(19) United States
(12) Patent Application Publication
(10) Pub. No.: US 2016/0194653 A1
(43) Pub. Date: Jul. 7, 2016

(54) HYPERSENSITIVE ABA RECEPTORS

(71) Applicant: THE REGENTS OF THE UNIVERSITY OF CALIFORNIA, Oakland, CA (US)

(72) Inventors: Sean Cutler, Riverside, CA (US); Michael Nuccio, Research Triangle Park, NC (US); Quideng Que, Research Triangle Park, NC (US)

(21) Appl. No.: 14/960,287

(22) Filed: Dec. 4, 2015

Related U.S. Application Data
(63) Continuation-in-part of application No. PCT/US2015/047020, filed on Aug. 26, 2015.
(60) Provisional application No. 62/042,095, filed on Aug. 26, 2014.
(60) Provisional application No. 62/098,025, filed on Dec. 30, 2014.

(51) Int. Cl. C12N 15/82

(52) U.S. Cl. CPC C12N 15/8271; C12N 15/8213

(57) ABSTRACT

Hypersensitive PYR/PYL polypeptides, compositions, and methods are provided.

### CROSS-REFERENCE TO RELATED PATENT APPLICATIONS

[0001] The present patent application is a continuation-in-part of PCT/US2015/047020, filed Aug. 26, 2015, which claims benefit of priority to U.S. Provisional Patent Application No. 62/042,095, filed Aug. 26, 2014 and U.S. Provisional Patent Application No. 62/098,025, filed Dec. 30, 2014, which are incorporated by reference for all purposes.

### STATEMENT AS TO RIGHTS TO INVENTIONS MADE UNDER FEDERALLY SPONSORED RESEARCH AND DEVELOPMENT

[0002] This invention was made with Government support under Grant No. 1258175 awarded by the National Science Foundation. The Government has certain rights in this invention.

### BACKGROUND OF THE INVENTION

[0003] Abscisic acid (ABA) is a plant hormone that regulates signal transduction associated with abiotic stress responses Cutler, S. R., et al. Annu. Rev. Plant Biol. 61, 651-679 (2010)). The ABA signaling pathway has been exploited to improve plant stress response and associated yield traits via numerous approaches (Wang, Y., et al. Plant J. 43, 413-424 (2005)). The direct application of ABA to plants improves their water use efficiency (Rademacher, W., Maisch, R., Liessegang, J., & Jung, J. (1987). Water consumption and yield formation in crop plants under the influence of synthetic analogues of abscisic acid. Plant growth regulators for agricultural and amenity use. BCPC Monograph, (36), 53-66); for this reason, the discovery of ABA agonists (Okamoto, M., et al., Proc. Natl. Acad. Sci. U.S.A 110, 12132-12137 (2013); Park, S.-Y., et al. Science 324, 1068-1071 (2009)) has received increasing attention, as such molecules may be beneficial for improving crop yield. A complementary approach to activating the ABA pathway involves increasing a plant's sensitivity to ABA via genetic methods. For example, conditional antisense of farnesyl transferase beta subunit gene, which increases a plant's ABA sensitivity, improves yield under moderate drought in both canola and Arabidopsis (Wang et al., 2005).

[0004] It has recently been discovered that ABA elicits many of its cellular responses by binding to a soluble family of receptors called PYR/PYL proteins. PYR/PYL proteins belong to a large family of ligand-binding proteins named the START superfamily (Iyer, L. M., et al., Proteins Struct. Funct. Bioinforma. 43, 134-144, 2001; Ponting, C. P., and Aravind, L. (1999). Trends Biochem. Sci. 24, 130-132 1999). These proteins contain a conserved three-dimensional architecture consisting of seven anti-parallel beta sheets, which surround a central alpha helix to form a “helix-grip” motif; together, these structural elements form a ligand-binding pocket for binding ABA or other agonists.

[0005] Structural and functional studies have uncovered a series of conformational changes and critical contacts between PYR/PYL receptors and type II C protein phosphatases (PP2Cs) that are necessary for ABA-mediated PP2C inhibition by receptors. For example, when ABA or another agonist binds within the ligand-binding pockets of PYR/PYL proteins, it stabilizes a conformational change that allows the receptors to bind and inhibit a family of PP2Cs that normally repress ABA signaling (Weiner et al., 2010). In particular, ABA binding leads to a large rearrangement in a flexible “gate” loop that flanks the ligand-binding pocket. Upon ABA binding, the gate loop adopts a closed conformation that is stabilized by several direct contacts between the loop and ABA. This agonist-bound, closed form of the gate allows PYR/PYL proteins to dock into, and inhibit, the active site of PP2Cs. The resulting inhibition in turn allows activation of downstream kinases in the SnRK2 class, which are responsible for the regulation of the activity of transcription factors, ion channels and other proteins involved in ABA responses (Weiner, J. J., et al. (2010) Curr. Opin. Plant Biol. 13, 495-5022010). Thus, the stabilization of a closed gate conformation of the receptors plays a role in their activation and PYR/PYL receptors are molecular switches at the apex of a signaling cascade that regulates diverse ABA responses.

[0006] In addition to the role that gate closure plays in receptor activation, other structural rearrangements also occur. For example, PYR1, PYL1, and PYL2 are homodimers in solution, but bind to PP2Cs as monomers. The homodimer interface overlaps with the PP2C binding interface and therefore an intact receptor homodimer cannot bind to and inhibit the PP2C. Thus, dimer formation is antagonistic to ABA signaling and receptor dimer-breaking is a necessary step in receptor activation. Additionally, a recognition module containing a central conserved tryptophan “lock” residue located on the PP2C inserts into a small pore formed in the ABA-bound receptors. Mutation of the tryptophan lock residue abolishes receptor-mediated inactivation of PP2C activity, demonstrating a role of the lock residue's insertion into the receptor's pore.

[0007] Over-expression of wild type or mutant ABA receptors in transgenic Arabidopsis thaliana, Solanum lycopersicum and Oryza sativa improves drought tolerance (Gonzalez-Guzman, M., et al. (2014). J. Exp. Bot. eru219, 2014; Kim et al., J. Exp. Bot. 63, 1013-1024 2012; Santiago et al., Plant J. 60, 575-588 (2009)). ABA receptors with increased sensitivity relative to their wild type counterparts can elicit greater ABA responses when expressed in planta. Consistent with this, Pizzio et al., Plant Physiol. 163, 441-455 (2013) described the PYL4 mutation A194T mutant, which requires lower concentrations of ABA to elicit measured ABA responses in comparison to wild type PYL4. When this mutant is over-expressed in transgenic Arabidopsis, the plants have increased sensitivity to ABA relative to both wild type controls and PYL4 over-expression controls (Pizzio et al., Plant Physiol. 163, 441-455 (2013)). Moreover, the 35S::PYL4^{A194T} lines display better drought tolerance and water use than wild type or 35S::PYL4 overexpression lines. The A194T mutation is located in PYL4's carboxyl terminus, which is a part of the receptors that is highly variable in length and composition between receptors. This lack of conservation makes it difficult to predict the mechanism by which the mutation alters ABA sensitivity.

### BRIEF SUMMARY OF THE INVENTION

[0008] Mutations in PYR/PYL receptor proteins have been identified that result in the receptor proteins being hypersensitive to ABA. In some embodiments, nucleic acids (e.g., isolated) encoding such proteins are provided. In some embodiments, the nucleic acids comprises a polynucleotide encoding a mutated PYR/PYL receptor polypeptide comprising an amino acid substitution corresponding to the amino acid F61, V81, I110, E141, and A160 in PYR1 as set forth in SEQ ID NO:1, wherein the mutated PYR/PYL receptor has increased sensitivity to abscisic acid compared to a control PYR/PYL receptor lacking the substitution.

[0009] In some embodiments, the PYR/PYL receptor polypeptide comprises an amino acid substitution corresponding to the amino acid F61. In some embodiments, the amino acid substitution is selected from L and M.

[0010] In some embodiments, the PYR/PYL receptor polypeptide comprises an amino acid substitution corresponding to the amino acid V81. In some embodiments, the amino acid substitution is selected from I and Y.

[0011] In some embodiments, the PYR/PYL receptor polypeptide comprises an amino acid substitution corresponding to the amino acid I110. In some embodiments, the amino acid substitution is selected from C and S.

[0012] In some embodiments, the PYR/PYL receptor polypeptide comprises an amino acid substitution corresponding to the amino acid E141. In some embodiments, the amino acid substitution is selected from C, I, L, M, N, T, V, W, and Y.

[0013] In some embodiments, the PYR/PYL receptor polypeptide comprises an amino acid substitution corresponding to the amino acid A160. In some embodiments, the amino acid substitution is selected from C, I, and V.

[0014] In some embodiments, the PYR/PYL receptor polypeptide comprises an amino acid substitution corresponding to:

### F61L and A160C;

### F61M and A160V;

### F61M, I110S, and A160V; or

### F61L, V81I, I110C and A160V.

[0015] In some embodiments, the mutated PYR/PYL receptor polypeptide is substantially identical to (e.g., at least 50%, 55%, 60%, 65%, 70%, 75%, 80%, 85%, 90%, 91%, 92%, 93%, 94% 95%, 96%, 97%, 98%, or 99% identical to) any of SEQ ID NOs:1-119 or SEQ ID NOs:124-154 (e.g., 124, 125, 126, 127, 128, 129, 130, 131, 132, 133, 134, 135, 136, 137, 138, 139, 140, 141, 142, 143, 144, 145, 146, 147, 148, 149, 150, 151, 152, 153, or 154), 155-361 (e.g., 155, 156, 157, 158, 159, 160, 161, 162, 163, 164, 165, 166, 167, 168, 169, 170, 171, 172, 173, 174, 175, 176, 177, 178, 179, 180, 181, 182, 183, 184, 185, 186, 187, 188, 189, 190, 191, 192, 193, 194, 195, 196, 197, 198, 199, 200, 201, 202, 203, 204, 205, 206, 207, 208, 209, 210, 211, 212, 213, 214, 215, 216, 217, 218, 219, 220, 221, 222, 223, 224, 225, 226, 227, 228, 229, 230, 231, 232, 233, 234, 235, 236, 237, 238, 239, 240, 241, 242, 243, 244, 245, 246, 247, 248, 249, 250, 251, 252, 253, 254, 255, 256, 257, 258, 259, 260, 261, 262, 263, 264, 265, 266, 267, 268, 269, 270, 271, 272, 273, 274, 275, 276, 277, 278, 279, 280, 281, 282, 283, 284, 285, 286, 287, 288, 289, 290, 291, 292, 293, 294, 295, 296, 297, 298, 299, 300, 301, 302, 303, 304, 305, 306, 307, 308, 309, 310, 311, 312, 313, 314, 315, 316, 317, 318, 319, 320, 321, 322, 323, 324, 325, 326, 327, 328, 329, 330, 331, 332, 333, 334, 335, 336, 337, 338, 339, 340, 341, 342, 343, 344, 345, 346, 347, 348, 349, 350, 351, 352, 353, 354, 355, 356, 357, 358, 359, 360, or 361) or comprises any of SEQ ID NOs: 120-123.

[0016] Also provided is a plant (e.g. a transgenic or non-transgenic plant) comprising a polynucleotide encoding a PYR/PYL receptor polypeptide as described above or elsewhere herein, e.g., comprising an amino acid substitution corresponding to the amino acid F61, V81, I110, E141, and A160 in PYR1 as set forth in SEQ ID NO:1. In some embodiments, the plant will have increased sensitivity to ABA compared to a control plant lacking the polypeptide. In some embodiments, the polynucleotide is operably linked to a heterologous promoter. In some embodiments, the polynucleotide is operably linked to a native (non-heterologous) promoter. In some embodiments, the PYR/PYL receptor polypeptide comprises an amino acid substitution corresponding to: F61L and A160C; F61M and A160V; F61M, I110S, and A160V; or F61L, V81I, I110C and A160V. In some embodiments, the encoded PYR/PYL receptor polypeptide only has one (or in some embodiments, only 2, 3, or 4) amino acid substitution compared to the plant's native PYR/PYL receptor polypeptide. In some embodiments, the plant's native PYR/PYL receptor polypeptide coding sequence has been modified (e.g., by CRISPR) to contain the 1, 2, 3, or 4 substitutions. In some embodiments, the PYR/PYL receptor polypeptide comprises an amino acid substitution corresponding to the amino acid F61. In some embodiments, the amino acid substitution is selected from L and M. In some embodiments, the PYR/PYL receptor polypeptide comprises an amino acid substitution corresponding to the amino acid V81. In some embodiments, the amino acid substitution is selected from I and Y. In some embodiments, the PYR/PYL receptor polypeptide comprises an amino acid substitution corresponding to the amino acid I110. In some embodiments, the amino acid substitution is selected from C and S. In some embodiments, the PYR/PYL receptor polypeptide comprises an amino acid substitution corresponding to the amino acid E141. In some embodiments, the amino acid substitution is selected from C, I, L, M, N, T, V, W, and Y. In some embodiments, the PYR/PYL receptor polypeptide comprises an amino acid substitution corresponding to the amino acid A160. In some embodiments, the amino acid substitution is selected from C, I, and V. In some embodiments, the PYR/PYL receptor polypeptide comprises an amino acid substitution corresponding to: F61L and A160C; F61M and A160V; F61M, I110S, and A160V; or F61L, V81I, I110C and A160V.

[0017] Also provided is a plant (e.g., including but not limited to a maize plant) comprising an in situ mutated PYR/PYL receptor polypeptide comprising an amino acid substitution corresponding to the amino acid F61, V81, I110, E141, and A160 in PYR1 as set forth in SEQ ID NO:1, wherein the mutated PYR/PYL receptor polypeptide has increased sensitivity to abscisic acid compared to a control PYR/PYL receptor lacking the substitution. In some embodiments, the PYR/PYL receptor polypeptide comprises an amino acid substitution corresponding to the amino acid F61. In some embodiments, the amino acid substitution is selected from L and M. In some embodiments, the PYR/PYL receptor polypeptide comprises an amino acid substitution corresponding to the amino acid V81. In some embodiments, the amino acid substitution is selected from I and Y. In some embodiments, the PYR/PYL receptor polypeptide comprises an amino acid substitution corresponding to the amino acid I110. In some embodiments, the amino acid substitution is selected from C and S. In some embodiments, the PYR/PYL receptor polypeptide comprises an amino acid substitution corresponding to the amino acid E141. In some embodiments, the amino acid substitution is selected from C, I, L, M, N, T, V, W, and Y. In some embodiments, the PYR/PYL receptor polypeptide comprises an amino acid substitution corresponding to the amino acid A160. In some embodiments, the amino acid substitution is selected from C, I, and V. In some embodiments, the PYR/PYL receptor polypeptide comprises an amino acid substitution corresponding to: F61L and A160C; F61M and A160V; F61M, I110S, and A160V; or F61L, V81I, I110C and A160V. In some embodiments, the mutated PYR/PYL receptor polypeptide is substantially identical to (e.g., at least 50%, 55%, 60%, 65%, 70%, 75%, 80%, 85%, 90%, 91%, 92%, 93%, 94% 95%, 96%, 97%, 98%, or 99% identical to) any of SEQ ID NOs:1-119 or SEQ ID NOs:124-154 (e.g., 124, 125, 126, 127, 128, 129, 130, 131, 132, 133, 134, 135, 136, 137, 138, 139, 140, 141, 142, 143, 144, 145, 146, 147, 148, 149, 150, 151, 152, 153, or 154), 155-361 (e.g., 155, 156, 157, 158, 159, 160, 161, 162, 163, 164, 165, 166, 167, 168, 169, 170, 171, 172, 173, 174, 175, 176, 177, 178, 179, 180, 181, 182, 183, 184, 185, 186, 187, 188, 189, 190, 191, 192, 193, 194, 195, 196, 197, 198, 199, 200, 201, 202, 203, 204, 205, 206, 207, 208, 209, 210, 211, 212, 213, 214, 215, 216, 217, 218, 219, 220, 221, 222, 223, 224, 225, 226, 227, 228, 229, 230, 231, 232, 233, 234, 235, 236, 237, 238, 239, 240, 241, 242, 243, 244, 245, 246, 247, 248, 249, 250, 251, 252, 253, 254, 255, 256, 257, 258, 259, 260, 261, 262, 263, 264, 265, 266, 267, 268, 269, 270, 271, 272, 273, 274, 275, 276, 277, 278, 279, 280, 281, 282, 283, 284, 285, 286, 287, 288, 289, 290, 291, 292, 293, 294, 295, 296, 297, 298, 299, 300, 301, 302, 303, 304, 305, 306, 307, 308, 309, 310, 311, 312, 313, 314, 315, 316, 317, 318, 319, 320, 321, 322, 323, 324, 325, 326, 327, 328, 329, 330, 331, 332, 333, 334, 335, 336, 337, 338, 339, 340, 341, 342, 343, 344, 345, 346, 347, 348, 349, 350, 351, 352, 353, 354, 355, 356, 357, 358, 359, 360, or 361) or comprises any of SEQ ID NOs: 120-123.

[0018] Also provided are expression cassettes comprising a promoter operably linked to the polynucleotide encoding a PYR/PYL receptor polypeptide as described above or elsewhere herein, e.g., comprising an amino acid substitution corresponding to the amino acid F61, V81, I110, E141, and A160 in PYR1 as set forth in SEQ ID NO:1, wherein introduction of the expression cassette into a plant results in the plant having increased sensitivity to abscisic acid compared to a control plant lacking the expression cassette.

[0019] In some embodiments, the promoter is heterologous to the polynucleotide. In some embodiments, the promoter is inducible. In some embodiments, the promoter is a stress-inducible promoter.

[0020] Also provided is an expression vector comprising the expression cassette as described above or elsewhere herein.

[0021] Also provided are plants comprising an expression cassette as described above or elsewhere herein, wherein the plant has increased sensitivity to abscisic acid compared to a control plant lacking the expression cassette. Also provided is a plant cell from the plant.

[0022] Also provided is a seed, flower, leaf, fruit, processed food, or food ingredient from a plant comprising a hypersensitive a PYR/PYL receptor polypeptide as described herein.

[0023] Also provided is a method of producing a plant having increased sensitivity to abscisic acid. In some embodiments, the method comprises: introducing the expression cassette encoding a hypersensitive a PYR/PYL receptor polypeptide as described herein into a plurality of plants; and selecting a plant that expresses the polynucleotide from the plurality of plants.

[0024] In some embodiments, the method comprises: introducing a mutation into a polynucleotide encoding a hypersensitive PYR/PYL polypeptide as described herein, e.g., wherein the mutation results in a polynucleotide encoding an amino acid substitution corresponding to the amino acid F61, V81, I110, E141, and A160 in PYR1 as set forth in SEQ ID NO:1. In some embodiments, the introducing occurs in situ in the genome of a plant cell. In some embodiments, the introducing comprises clustered regularly interspaced short palindromic repeats (CRISPR)/Cas genome editing.

[0025] Provided herein are methods and reagents for producing a plant (e.g., a maize plant) having increased sensitivity to abscisic acid, the method includes introducing a mutation into a polynucleotide encoding a PYR/PYL polypeptide, where the mutation is introduced in situ in the genome of the plant using RNA directed genome modification methods.

[0026] In one aspect, provided herein is a guide ribonucleic acid (gRNA). In certain embodiments the gRNA includes a CRISPR ribonucleic acid (crRNA) that is substantially identical to SEQ ID NOS: 363, 364, 365, 366, 367 or 369; and a transacting ribonucleic acid (tracRNA), where the PYR/PYL mutation target site comprises a nucleic acid that encodes for V89 of PYL-E or E149 of PYL-E.

[0027] In some embodiments of the gRNA, the PYR/PYL mutation target site includes a nucleic acid that encodes for V89 of PYL-E. In some embodiments, the PYR/PYL mutation target site has the sequence of SEQ ID NO:362.

[0028] In some embodiments, the PYR/PYL mutation target site includes a nucleic acid that encodes for E149 of PYL-E. In certain embodiments, the PYR/PYL mutation target site has the sequence of SEQ ID NO:368.

[0029] In certain embodiments, the tracRNA is linked to the 3′ end of the gRNA. In specific embodiments, the tracRNA is encoded by a nucleotide having a sequence that is substantially identical to SEQ ID NO: 370.

[0030] In another aspect, provided herein is an isolated nucleic acid that includes a polynucleotide encoding any one of the gRNAs described herein.

[0031] In another aspect, provided herein is an expression cassette that includes an RNA polymerase promoter operably linked to a polynucleotide encoding any one of the gRNAs described herein. In certain embodiments, the RNA polymerase promoter is an RNA polymerase III (polIII) promoter. In specific embodiments, the polIII promoter is a U3 promoter or a U6 promoter. In some embodiments, the expression cassette has the sequence of any one of SEQ ID NOS:371-373.

[0032] In another aspect, provided herein is an expression vector that includes an expression cassette, where the expression cassette includes an RNA polymerase promoter operably linked to a polynucleotide encoding any one of the gRNAs described herein.

[0033] In another aspect, provided herein is an expression vector that includes a first expression cassette and a second expression cassette. In certain embodiments, the first expression cassette is an expression cassette that includes an RNA polymerase promoter operably linked to a polynucleotide encoding any one of the gRNAs described herein and the second expression cassette is an expression cassette comprising a promoter operably linked to a polynucleotide encoding a CRISPR-associated endonuclease 9 (Cas9). In some embodiments, the expression vector includes a third expression cassette, wherein the third expression cassette is an expression cassette that includes an RNA polymerase promoter operably linked to a polynucleotide encoding any one of the gRNAs described herein, and the third expression cassette is different than the first expression cassette.

[0034] In some embodiments, the expression vector includes a first, second and third expression cassette, where the first expression cassette is an expression cassette that includes a promoter operably linked to a polynucleotide encoding a CRISPR-associated endonuclease 9 (Cas9), the second expression cassette has a sequence that is substantially identical to SEQ ID NO: 371 or SEQ ID NO:372, and the third expression cassette has a sequence that is substantially identical to SEQ ID NO:373. In certain embodiments, the promoter operably linked to the polynucleotide encoding Cas9 is an ubiquitin-1 promoter (prUbi-10).

[0035] In another aspect, provided herein is a cell that includes any of the expression vectors described above or elsewhere herein.

[0036] Also provided is a plant that includes an expression vector as described above or elsewhere herein. In some embodiments, the plant is a maize plant.

[0037] Also provided is a plant cell from the plant described above or elsewhere herein.

[0038] In another aspect, provided herein is a seed, flower, leaf, fruit, processed food, or food ingredient from the plant described above or elsewhere herein. In certain embodiments, the introduction of the expression vector into the plant described above or elsewhere herein results in the plant having increased sensitivity to abscisic acid compared to a control plant lacking the expression cassette.

[0039] In another aspect, provided herein is a method of producing a plant having a mutation at a genomic PYR/PYL mutation target site. In some embodiments the method includes introducing into plant cells an expression vector that includes a polynucleotide encoding a gRNA and a Cas9 as described above or elsewhere herein and at least one repair nucleic acid comprising the mutation. In certain embodiments, the mutation is introduced in the genomic PYR/PYLR mutation target site by a homologous recombination upon a Cas9 cleavage event in the genomic PYR/PYLR mutation target site. In some embodiments, the method further includes selecting plant cells having the mutation; thereby producing the plant. In some embodiments, the introducing occurs in situ in the genome of a plant cell. In some embodiments, the mutation is introduced by introducing into a plant embryo cell the expression vector and at least one repair nucleic acid, where the genome of the plant embryo comprises the PYR/PYL mutation target site and where the repair nucleic acid comprises the mutation and introduces the mutation at the PYR/PYL mutation target site by homologous recombination upon a Cas9 cleavage event in the PYL-E mutation target site.

[0040] In some embodiments, the repair nucleic acid has a sequence that is substantially identical to any one of the sequence of SEQ ID NOS:375 to 387 In certain embodiments, the repair nucleic acid has a sequence that is substantially identical to SEQ ID NO:377. In some embodiments, the repair nucleic acid has a sequence that is substantially identical to the sequence of SEQ ID NO:387. In other embodiments, two repair nucleic acids are introduced, and wherein the repair nucleic acids have sequences that are substantially identical to SEQ ID NO:377 and SEQ ID NO:379. In specific embodiments, the plant is a maize plant.

[0041] In another aspect, provided herein is a kit that includes an expression vector of that includes a polynucleotide encoding a gRNA and a polynucleotide encoding a Cas9 as described above or elsewhere herein and at least one repair nucleic acid, wherein the repair nucleic acid comprises a PYL-E mutation and is capable of introducing the PYL-E mutation in situ in a plant cell genome by homologous recombination upon a Cas9 cleavage event. In some embodiments, the at least one repair nucleic acid has a sequence that is substantially identical to SEQ ID NOS::374 to 386.

[0042] In another aspect, provided herein is an isolated nucleic acid comprising a polynucleotide encoding a mutated PYR/PYL receptor polypeptide comprising an amino acid substitution corresponding to the amino acid V89 in PYL-E, wherein the amino acid substitution is A (SEQ ID NO:389). In some embodiments, the mutated PYR/PYL receptor polypeptide further comprises an amino acid substitution corresponding to the amino acid E149. In certain embodiments the amino acid substitution corresponding to the amino acid E149 is L (SEQ ID NO:390).

[0043] In yet another aspect, provided herein is an isolated nucleic acid comprising a polynucleotide encoding a fusion protein comprising a mutated PYR/PYL receptor polypeptide and a fusion partner polypeptide, wherein the mutated PYR/PYL receptor polypeptide comprises an amino acid substitution corresponding to the amino acid V89 in PYL-E, wherein the amino acid substitution is A. In certain embodiments, the mutated PYR/PYL receptor polypeptide further comprises an amino acid substitution corresponding to the amino acid E149. In specific embodiments, the amino acid substitution corresponding to the amino acid E149 is L.

[0044] In some embodiments, the fusion partner polypeptide includes a transcription activation domain or a transcription modulation domain. In certain embodiments, the transcription activation domain is VP16 or VP64. In certain embodiments, the fusion protein further comprises a nuclear localization signal sequence. In some embodiments, the mutated PYR/PYL receptor polypeptide has increased sensitivity to abscisic acid compared to a control PYR/PYL receptor polypeptide lacking the substitution.

[0045] Provided herein is a cell comprising a polynucleotide as described above or elsewhere herein. In certain embodiments, the polynucleotide is a heterologous polypeptide. In some embodiments, the cell is a non-plant eukaryotic cell.

[0046] In yet another embodiment, provided herein is a plant that includes a polynucleotide as described above or elsewhere herein. In certain embodiments, the plant is a maize plant.

[0047] In another embodiment, provided herein is an expression cassette comprising a promoter operably linked to a polynucleotide as described above or elsewhere herein. In some embodiments, the promoter is heterologous to the polynucleotide. In certain embodiments, the promoter is inducible. In some embodiments, the promoter is a stress-inducible promoter.

[0048] In another embodiment, provided herein is an expression vector comprising the expression cassette as described above or elsewhere herein.

[0049] In another aspect, provided herein is a plant that includes the expression cassette as described above or elsewhere herein. In another aspect, provided herein is a plant cell from the plant as described above or elsewhere herein. In yet another aspect, provided herein is a seed, flower, leaf, fruit, processed food, or food ingredient from the plant as described above or elsewhere herein.

[0050] Other aspects of the invention are described elsewhere herein.

### DEFINITIONS

[0051] The term “PYR/PYL receptor polypeptide” refers to a protein characterized in part by the presence of one or more or all of a polyketide cyclase domain 2 (PF10604), a polyketide cyclase domain 1 (PF03364), and a Bet V I domain (PF03364), which in wild-type form mediates abscisic acid (ABA) and ABA analog signaling. A wide variety of PYR/PYL receptor polypeptide sequences are known in the art. In some embodiments, a PYR/PYL receptor polypeptide comprises a polypeptide that is substantially identical to PYR1 (SEQ ID NO:1), PYL1 (SEQ ID NO:2), PYL2 (SEQ ID NO:3), PYL3 (SEQ ID NO:4), PYL4 (SEQ ID NO:5), PYL5 (SEQ ID NO:6), PYL6 (SEQ ID NO:7), PYL7 (SEQ ID NO:8), PYL8 (SEQ ID NO:9), PYL9 (SEQ ID NO:10), PYL10 (SEQ ID NO:11), PYL11 (SEQ ID NO:12), PYL12 (SEQ ID NO:13), or PYL13 (SEQ ID NO:14), or to any of SEQ ID NOs:15-119.

[0052] A “wild-type PYR/PYL receptor polypeptide” refers to a naturally occurring PYR/PYL receptor polypeptide that mediates abscisic acid (ABA) and ABA analog signaling.

[0053] A “mutated PYR/PYL receptor polypeptide” refers to a PYR/PYL receptor polypeptide that is a variant from a naturally-occurring (i.e., wild-type) PYR/PYL receptor polypeptide. As used herein, a mutated PYR/PYL receptor polypeptide comprises one, two, three, four, or more amino acid substitutions relative to a corresponding wild-type PYR/PYL receptor polypeptide while retaining ABA-responsiveness of the receptor. In this context, a “mutated” polypeptide can be generated by any method for generating non-wild type nucleotide sequences. In some embodiments, a mutated PYR/PYL receptor polypeptide is hypersensitive, meaning the mutant receptor polypeptide is activated by ABA more strongly than a corresponding homologous wildtype receptor (or at least compared to an otherwise identical PYR/PYL polypeptide having the wildtype amino acid at the mutated position described herein) would be activated by the same concentration of ABA, or that the mutant receptor polypeptide is activated by a lower (e.g., half or less of the) concentration of ABA than activates the corresponding homologous wild-type receptor, or both. In some embodiments, the mutant receptor polypeptide can be determined visually in a HAB1 yeast two-hybrid assay to respond to 0.25 μM or less ABA.

[0054] An “amino acid substitution” refers to replacing the naturally occurring amino acid residue in a given position (e.g., the naturally occurring amino acid residue that occurs in a wild-type PYR/PYL receptor polypeptide) with an amino acid residue other than the naturally-occurring residue. For example, the naturally occurring amino acid residue at position 60 of the wild-type PYR1 receptor polypeptide sequence (SEQ ID NO:1) is histidine (H60); accordingly, an amino acid substitution at H60 refers to replacing the naturally occurring histidine with any amino acid residue other than histidine.

[0055] An amino acid residue “corresponding to an amino acid residue [X] in [specified sequence,” or an amino acid substitution “corresponding to an amino acid substitution [X] in [specified sequence]” refers to an amino acid in a polypeptide of interest that aligns with the equivalent amino acid of a specified sequence. Generally, as described herein, the amino acid corresponding to a position of a specified PYR/PYL receptor polypeptide sequence can be determined using an alignment algorithm such as BLAST. In some embodiments of the present invention, “correspondence” of amino acid positions is determined by aligning to a region of the PYR/PYL receptor polypeptide comprising SEQ ID NO:1, as discussed further herein. When a PYR/PYL receptor polypeptide sequence differs from SEQ ID NO:1 (e.g., by changes in amino acids or addition or deletion of amino acids), it may be that a particular mutation associated with hypersensitive activity of the PYR/PYL receptor will not be in the same position number as it is in SEQ ID NO:1. For example, amino acid position V85 of PYL2 (SEQ ID NO:3) aligns with amino acid position V81 of PYR1 (SEQ ID NO:1), as can be readily illustrated in an alignment of the two sequences. In this example, amino acid position 85 in SEQ ID NO:3 corresponds to position 81 in SEQ ID NO:1. Examples of corresponding positions are shown in FIG. 2

[0056] Two nucleic acid sequences or polypeptides are said to be “identical” if the sequence of nucleotides or amino acid residues, respectively, in the two sequences is the same when aligned for maximum correspondence as described below. The terms “identical” or percent “identity,” in the context of two or more nucleic acids or polypeptide sequences, refer to two or more sequences or subsequences that are the same or have a specified percentage of amino acid residues or nucleotides that are the same, when compared and aligned for maximum correspondence over a comparison window, as measured using one of the following sequence comparison algorithms or by manual alignment and visual inspection. When percentage of sequence identity is used in reference to proteins or peptides, it is recognized that residue positions that are not identical often differ by conservative amino acid substitutions, where amino acids residues are substituted for other amino acid residues with similar chemical properties (e.g., charge or hydrophobicity) and therefore do not change the functional properties of the molecule. Where sequences differ in conservative substitutions, the percent sequence identity may be adjusted upwards to correct for the conservative nature of the substitution. Means for making this adjustment are well known to those of skill in the art. Typically this involves scoring a conservative substitution as a partial rather than a full mismatch, thereby increasing the percentage sequence identity. Thus, for example, where an identical amino acid is given a score of 1 and a non-conservative substitution is given a score of zero, a conservative substitution is given a score between zero and 1. The scoring of conservative substitutions is calculated according to, e.g., the algorithm of Meyers & Miller, Computer Applic. Biol. Sci. 4:11-17 (1988) e.g., as implemented in the program PC/GENE (Intelligenetics, Mountain View, Calif., USA).

[0057] The phrase “substantial identity” or “substantially identical,” used in the context of two nucleic acids or polypeptides, refers to a sequence that has at least 50% sequence identity with a reference sequence. Alternatively, percent identity can be any integer from 50% to 100%. In some embodiments, a sequence is substantially identical to a reference sequence if the sequence has at least 50%, 55%, 60%, 65%, 70%, 75%, 80%, 85%, 90%, 91%, 92%, 93%, 94%, 95%, 96%, 97%, 98%, or 99% sequence identity to the reference sequence as determined using the methods described herein; preferably BLAST using standard parameters, as described below. Embodiments of the present invention provide for nucleic acids encoding polypeptides that are substantially identical to any of SEQ ID NO:1-119 or SEQ ID NOs:155-361.

[0058] For sequence comparison, typically one sequence acts as a reference sequence, to which test sequences are compared. When using a sequence comparison algorithm, test and reference sequences are entered into a computer, subsequence coordinates are designated, if necessary, and sequence algorithm program parameters are designated. Default program parameters can be used, or alternative parameters can be designated. The sequence comparison algorithm then calculates the percent sequence identities for the test sequences relative to the reference sequence, based on the program parameters.

[0059] A “comparison window,” as used herein, includes reference to a segment of any one of the number of contiguous positions selected from the group consisting of from 20 to 600, usually about 50 to about 200, more usually about 100 to about 150 in which a sequence may be compared to a reference sequence of the same number of contiguous positions after the two sequences are optimally aligned. Methods of alignment of sequences for comparison are well-known in the art. Optimal alignment of sequences for comparison can be conducted, e.g., by the local homology algorithm of Smith & Waterman, Adv. Appl. Math. 2:482 (1981), by the homology alignment algorithm of Needleman & Wunsch, J. Mol. Biol. 48:443 (1970), by the search for similarity method of Pearson & Lipman, Proc. Nat'l. Acad. Sci. USA 85:2444 (1988), by computerized implementations of these algorithms (GAP, BESTFIT, FASTA, and TFASTA in the Wisconsin Genetics Software Package, Genetics Computer Group, 575 Science Dr., Madison, Wis.), or by manual alignment and visual inspection.

[0060] Algorithms that are suitable for determining percent sequence identity and sequence similarity are the BLAST and BLAST 2.0 algorithms, which are described in Altschul et al. (1990)J. Mol. Biol. 215: 403-410 and Altschul et al. (1977) Nucleic Acids Res. 25: 3389-3402, respectively. Software for performing BLAST analyses is publicly available through the National Center for Biotechnology Information (NCBI) web site. The algorithm involves first identifying high scoring sequence pairs (HSPs) by identifying short words of length W in the query sequence, which either match or satisfy some positive-valued threshold score T when aligned with a word of the same length in a database sequence. T is referred to as the neighborhood word score threshold (Altschul et al, supra). These initial neighborhood word hits acts as seeds for initiating searches to find longer HSPs containing them. The word hits are then extended in both directions along each sequence for as far as the cumulative alignment score can be increased. Cumulative scores are calculated using, for nucleotide sequences, the parameters M (reward score for a pair of matching residues; always >0) and N (penalty score for mismatching residues; always <0). For amino acid sequences, a scoring matrix is used to calculate the cumulative score. Extension of the word hits in each direction are halted when: the cumulative alignment score falls off by the quantity X from its maximum achieved value; the cumulative score goes to zero or below, due to the accumulation of one or more negative-scoring residue alignments; or the end of either sequence is reached. The BLAST algorithm parameters W, T, and X determine the sensitivity and speed of the alignment. The BLASTN program (for nucleotide sequences) uses as defaults a word size (W) of 28, an expectation (E) of 10, M=1, N=−2, and a comparison of both strands. For amino acid sequences, the BLASTP program uses as defaults a word size (W) of 3, an expectation (E) of 10, and the BLOSUM62 scoring matrix (see Henikoff & Henikoff, Proc. Natl. Acad. Sci. USA 89:10915 (1989)).

[0061] The BLAST algorithm also performs a statistical analysis of the similarity between two sequences (see, e.g., Karlin & Altschul, Proc. Nat'l. Acad. Sci. USA 90:5873-5787 (1993)). One measure of similarity provided by the BLAST algorithm is the smallest sum probability (P(N)), which provides an indication of the probability by which a match between two nucleotide or amino acid sequences would occur by chance. For example, a nucleic acid is considered similar to a reference sequence if the smallest sum probability in a comparison of the test nucleic acid to the reference nucleic acid is less than about 0.01, more preferably less than about 10⁻⁵, and most preferably less than about 10⁻²⁰.

[0062] The term “promoter,” as used herein, refers to a polynucleotide sequence capable of driving transcription of a coding sequence in a cell. Thus, promoters used in the polynucleotide constructs of the invention include cis-acting transcriptional control elements and regulatory sequences that are involved in regulating or modulating the timing and/or rate of transcription of a gene. For example, a promoter can be a cis-acting transcriptional control element, including an enhancer, a promoter, a transcription terminator, an origin of replication, a chromosomal integration sequence, 5′ and 3′ untranslated regions, or an intronic sequence, which are involved in transcriptional regulation. These cis-acting sequences typically interact with proteins or other biomolecules to carry out (turn on/off, regulate, modulate, etc.) gene transcription. A “plant promoter” is a promoter capable of initiating transcription in plant cells. A “constitutive promoter” is one that is capable of initiating transcription in nearly all tissue types, whereas a “tissue-specific promoter” initiates transcription only in one or a few particular tissue types.

[0063] A polynucleotide sequence is “heterologous” to an organism or a second polynucleotide sequence if it originates from a foreign species, or, if from the same species, is modified from its original form. For example, when a promoter is said to be operably linked to a heterologous coding sequence, it means that the coding sequence is derived from one species whereas the promoter sequence is derived another, different species; or, if both are derived from the same species, the coding sequence is not naturally associated with the promoter (e.g., is a genetically engineered coding sequence, e.g., from a different gene in the same species, or an allele from a different ecotype or variety).

[0064] An “expression cassette” refers to a nucleic acid construct that, when introduced into a host cell, results in transcription and/or translation of an RNA or polypeptide, respectively. Antisense or sense constructs that are not or cannot be translated are expressly included by this definition. In the case of both expression of transgenes and suppression of endogenous genes (e.g., by antisense, or sense suppression) one of skill will recognize that the inserted polynucleotide sequence need not be identical, but may be only substantially identical to a sequence of the gene from which it was derived. As explained herein, these substantially identical variants are specifically covered by reference to a specific nucleic acid sequence.

[0065] The term “host cell” refers to any cell capable of replicating and/or transcribing and/or translating a heterologous polynucleotide. Thus, a “host cell” refers to any prokaryotic cell (including but not limited to E. coli) or eukaryotic cell (including but not limited to yeast cells, mammalian cells, avian cells, amphibian cells, plant cells, fish cells, and insect cells), whether located in vitro or in vivo. For example, host cells may be located in a transgenic animal or transgenic plant prokaryotic cell (including but not limited to E. coli) or eukaryotic cells (including but not limited to yeast cells, mammalian cells, avian cells, amphibian cells, plant cells, fish cells, and insect cells). Host cells can be for example, transformed with the heterologous polynucleotide.

[0066] The term “plant” includes whole plants, shoot vegetative organs and/or structures (e.g., leaves, stems and tubers), roots, flowers and floral organs (e.g., bracts, sepals, petals, stamens, carpels, anthers), ovules (including egg and central cells), seed (including zygote, embryo, endosperm, and seed coat), fruit (e.g., the mature ovary), seedlings, plant tissue (e.g., vascular tissue, ground tissue, and the like), cells (e.g., guard cells, egg cells, trichomes and the like), and progeny of same. The class of plants that can be used in the method of the invention is generally as broad as the class of higher and lower plants amenable to transformation techniques, including angiosperms (monocotyledonous and dicotyledonous plants), gymnosperms, ferns, and multicellular algae. It includes plants of a variety of ploidy levels, including aneuploid, polyploid, diploid, haploid, and hemizygous.

### BRIEF DESCRIPTION OF THE DRAWINGS

[0067] FIG. 1 provides signal in a yeast two-hybrid assay with ABA concentration shown at the top and the identity of the mutants shown on the left side.

[0068] FIG. 2 provides the corresponding naturally-occurring amino acid at the five positions described herein for a number of different PYR/PYL proteins.

[0069] FIG. 3 provides an alignment of the middle portion a number of PYR/PYL proteins. (SEQ ID NOs:142-154)

[0070] FIG. 4 provides signal in a yeast two-hybrid assay and includes multiple mutations within PYR1.

[0071] FIG. 5 depicts a biolistic transformation vector pZmPYLE-V89A carrying expression cassettes for maize-optimized Cas9 and ZmPYLE-V89A gRNA to mediate cleavage at the ZmPYL-E target sequence (5′-CGCGA CGTCA ACGTC AAGAC-3′ (SEQ ID NO:362))

[0072] FIG. 6 provides a schematic map of binary vector pZmPYLE-E149L used for delivery with Agrobacterium-mediated transformation.

[0073] FIG. 7 provides a schematic map of plasmid vector pZmPYLE-V89A-E149L carrying expression cassettes for 2 different gRNAs and Cas9.

[0074] FIG. 8 provides a schematic map of binary plant transformation vector 23190 carrying expression cassettes for Cas9, gRNA and selectable marker gene PMI for mediating ZmPYL-E E149L mutagenesis.

[0075] FIG. 9A-B provide a schematic map of binary plant transformation vectors 23136 and 23189 carrying expression cassettes for Cas9, gRNA and selectable marker gene PMI for mediating ZmPYL-D E169L mutagenesis.

[0076] FIG. 10A-10B provide a schematic map of binary plant plant transformation vectors 22981 and 23191 carrying expression cassettes for Cas9, gRNA and selectable marker gene PMI for mediating ZmPYL-F E164L mutagenesis.

[0077] FIG. 11 provides a schematic map of binary plant plant transformation vector 23192 carrying expression cassettes for Cas9, gRNA and selectable marker gene PMI for mediating ZmPYL-E E148L.

[0078] FIG. 12 provides a schematic drawing of end point assay example to detect specific DNA sequence change (GA to CT) in ZmPYL-F that results in E164L amino acid residue mutation.

[0079] FIG. 13 shows sequence alignment (SEQ ID NOS:414-430) of targeted mutations in ZmPYL-F mediated by gRNA-Cas9 expressed from vector 22981.

### DETAILED DESCRIPTION OF THE INVENTION

### I. Introduction

[0080] To identify mutations causing increased receptor ABA sensitivity, we screened for mutants that lower the concentration of ABA required to induce a detectable interaction between PYR1 and HAB1 using a collection of PYR1 mutants that contain all possible single amino acid substitutions residues located in close proximity to ABA. Based on these results, we describe mutations in highly-conserved residues that substantially increase receptor ABA sensitivity.

[0081] Mutations in PYR/PYL receptor polypeptides have been discovered that result in hypersensitive forms of the PYR/PYL receptor, i.e., the mutated receptors are more responsive to the ABA compared to a corresponding wildtype PYR/PYL polypeptide.

[0082] Expression in a plant of one or more hypersensitive mutant PYR/PY1 receptor polypeptides as described here will result in a plant with increased ABA-sensitivity, and in some embodiments, higher stress tolerance or other phenotypes associated with ABA-responsiveness.

[0083] Also provided herein are methods and reagents for producing a plant (e.g., a maize plant) having increased sensitivity to abscisic acid, the method includes introducing a mutation into a polynucleotide encoding a PYR/PYL polypeptide, where the mutation is introduced in situ in the genome of the plant using RNA directed genome modification methods.

### II. Hypersensitive PYR/PYL Receptor Polypeptides

[0084] A wide variety of wild-type (naturally occurring) PYR/PYL polypeptide sequences are known in the art. Although PYR1 was originally identified as an abscisic acid (ABA) receptor in Arabidopsis, in fact PYR1 is a member of a group of at least 14 proteins (PYR/PYL proteins) in the same protein family in Arabidopsis that also mediate ABA signaling. This protein family is also present in other plants (see, e.g., SEQUENCE LISTING) and is characterized in part by the presence of one or more or all of a polyketide cyclase domain 2 (PF10604), a polyketide cyclase domain 1 (PF03364), and a Bet V I domain (PF03364). START/Bet v 1 superfamily domain are described in, for example, Radauer, BMC Evol. Biol. 8:286 (2008). In some embodiments, a wild-type PYR/PYL receptor polypeptide comprises any of SEQ ID NOs:1-119. In some embodiments, a wild-type PYR/PYL receptor polypeptide is substantially identical to (e.g., at least 50%, 55%, 60%, 65%, 70%, 75%, 80%, 85%, 90%, 91%, 92%, 93%, 94% 95%, 96%, 97%, 98%, or 99% identical to) any of SEQ ID NOs:1-119.

[0085] PYR/PYL receptor proteins have a conserved START-domain ligand-binding pocket flanked by two loops called the “gate” and the “latch” (Melcher, K. et al., Nature 462 (2009)). ABA binds to a PYR/PYL receptor protein at the ligand-binding pocket and ABA binding induces closure of the loops to seal ABA inside the ligand-binding pocket. The ligand-binding pocket of a PYR/PYL receptor polypeptide comprises amino acid residues that are in close proximity (e.g., within about 5 Å) to a PYR/PYL ligand (e.g., ABA) or a ligand-contacting water molecule when the ligand is bound to the PYR/PYL receptor. There are 25 residues that make up the PYR1 ligand-binding pocket. The residues of the ligand-binding pocket are also highly conserved among other PYR/PYL family members.

[0086] PYR/PYL receptor proteins directly bind to type 2 protein phosphatases (PP2Cs) and thus also contain a PP2C binding interface. The PP2C binding interface of a PYR/PYL receptor polypeptide comprises amino acid residues that are in close proximity (e.g., within about 5 Å) to PP2C when PP2C, the PYR/PYL receptor, and ABA are all bound together in a ternary complex. There are 25 residues that make up the PYR1 PP2C binding interface. The residues of the PP2C binding interface are also highly conserved among other PYR/PYL family members.

[0087] Hypersensitive PYR/PYL receptor polypeptides are non-naturally-occurring variants from naturally occurring (i.e., wild-type) PYR/PYL receptor polypeptides, wherein the variant (mutant) PYR/PYL receptor polypeptide is able to bind to and/or inhibit the activity of a PP2C in the presence of abscisic acid to a greater extent than a control PYR/PYL receptor polypeptide in the presence of the same concentration of ABA. Hypersensitive active PYR/PYL receptor polypeptides as described herein comprise one or more amino acid substitutions compared to a wild type PYR/PYL receptor polypeptide. In some embodiments, a hypersensitive PYR/PYL receptor polypeptide is substantially identical to (e.g., at least 50%, 55%, 60%, 65%, 70%, 75%, 80%, 85%, 90%, 91%, 92%, 93%, 94% 95%, 96%, 97%, 98%, or 99% identical to) any of SEQ ID NO:1, 2, 3, 4, 5, 6, 7, 8, 9, 10, 11, 12, 13, 14, 15, 16, 17, 18, 19, 20, 21, 22, 23, 24, 25, 26, 27, 28, 29, 30, 31, 32, 33, 34, 35, 36, 37, 38, 39, 40, 41, 42, 43, 44, 45, 46, 47, 48, 49, 50, 51, 52, 53, 54, 55, 56, 57, 58, 59, 60, 61, 62, 63, 64, 65, 66, 67, 68, 69, 70, 71, 72, 73, 74, 75, 76, 77, 78, 79, 80, 81, 82, 83, 84, 85, 86, 87, 88, 89, 90, 91, 92, 93, 94, 95, 96, 97, 98, 99, 100, 101, 102, 103, 104, 105, 106, 107, 108, 109, 110, 111, 112, 113, 114, 115, 116, 117, 118, or 119 and comprises 1, 2, 3, 4, or more mutations (e.g., amino acid substitutions) as described herein. In some embodiments, a hypersensitive PYR/PYL receptor polypeptide comprises SEQ ID NO:120, 121, 122, or 123 and comprises 1, 2, 3, 4, or more mutations (e.g., amino acid substitutions) as described herein:

(SEQ ID NO: 120)
CxSxxxxxxxAPxxxxWxxxxxFxxPxxxxxFxxxC
(SEQ ID NO: 121)
GxxRxVxxxSxxPAxxSxExLxxxD
(SEQ ID NO: 122)
GGxHRLxNYxS
(SEQ ID NO: 123)
ESxxVDxPxGxxxxxTxxFxxxxxxxNLxxL.

[0088] As shown in the Examples, it has been discovered that mutations can be made at any of several positions in PYR/PYL receptor polypeptides result in hypersensitivity to ABA. These positions are (corresponding to their position in Arabidopsis PYR1 (SEQ ID NO:1)): F61, V81, I110, E141, and A160. In some embodiments, a mutated PYR/PYL receptor polypeptide comprises one or more (e.g., one, two, three, or four) amino acid substitutions corresponding to these positions. For example, in some embodiments, the mutated PYR/PYL receptor polypeptide comprises at least the following corresponding mutations:

### F61L and A160C;

### F61M and A160V;

### F61M, I110S, and A160V; or

### F61L, V81I, I110C and A160V.

```
SEQ ID NO: 1; Arabidopsis wildtype PYR1
Met Pro Ser Glu Leu Thr Pro Glu Glu Arg Ser Glu
  1 5 10
Leu Lys Asn Ser Ile Ala Glu Phe His Thr Tyr Gln
                15 20
Leu Asp Pro Gly Ser Cys Ser Ser Leu His Ala Gln
25 30 35
Arg Ile His Ala Pro Pro Glu Leu Val Trp Ser Ile
                        40 45
Val Arg Arg Phe Asp Lys Pro Gln Thr Tyr Lys His
        50 55 60
Phe Ile Lys Ser Cys Ser Val Glu Gln Asn Phe Glu
                                65 70
Met Arg Val Gly Cys Thr Arg Asp Val Ile Val Ile
                75 80
Ser Gly Leu Pro Ala Asn Thr Ser Thr Glu Arg Leu
85 90 95
Asp Ile Leu Asp Asp Glu Arg Arg Val Thr Gly Phe
                        100 105
Ser Ile Ile Gly Gly Glu His Arg Leu Thr Asn Tyr
        110 115 120
Lys Ser Val Thr Thr Val His Arg Phe Glu Lys Glu
                                125 130
Asn Arg Ile Trp Thr Val Val Leu Glu Ser Tyr Val
                135 140
Val Asp Met Pro Glu Gly Asn Ser Glu Asp Asp Thr
145 150 155
Arg Met Phe Ala Asp Thr Val Val Lys Leu Asn Leu
                        160 165
Gln Lys Leu Ala Thr Val Ala Glu Ala Met Ala Arg
        170 175 180
Asn Ser Gly Asp Gly Ser Gly Ser Gln Val Thr
                                185 190
```

[0090] For position F61 (corresponding to the position in SEQ ID NO:1), hypersensitive mutations will include F61L or F61M. For position V81 (corresponding to the position in SEQ ID NO:1), hypersensitive mutations will include V81I or V81Y. For position I110 (corresponding to the position in SEQ ID NO:1), hypersensitive mutations will include I110C or MOS. As some native PYR/PYL polypeptides have a valine at the position corresponding to I110 of SEQ ID NO:1, in some embodiments where position I110 is mutated, the native amino acid will be valine, subsequently mutated to C or S. For position E141 (corresponding to the position in SEQ ID NO:1), hypersensitive mutations will include E141C, E141I, E141L, E141M, E141N, E141T, E141V, E141W, or E141Y. For position A160 (corresponding to the position in SEQ ID NO:1), hypersensitive mutations will include A160C, A160I or A160V. As some native PYR/PYL polypeptides have a valine at the position corresponding to A160 of SEQ ID NO:1, in some embodiments where position A160 is mutated, the native amino acid will be valine, subsequently mutated to C or I.

[0091] Any of the mutations described herein can be made in any wildtype PYR/PYL polypeptide, for example, in the polypeptides of any of SEQ ID NOs:1-119 or in polypeptides substantially identical to any of SEQ ID NOs:1-119 or comprising any of SEQ ID NOs: 120-123. Analogous amino acid substitutions can be made, for example, in PYR/PYL receptors other than PYR1 by aligning the PYR/PYL receptor polypeptide sequence to be mutated with the PYR1 receptor polypeptide sequence as set forth in SEQ ID NO:1. As a non-limiting example, an amino acid substitution in PYL2 that is analogous to the amino acid substitution V81I in PYR1 as set forth in SEQ ID NO:1 can be determined by aligning the amino acid sequences of PYL2 (SEQ ID NO:3) and PYR1 (SEQ ID NO:1) and identifying position V85 in PYL2 as aligning with amino acid position V81 of PYR1 (SEQ ID NO:1). Analogous amino acid positions in PYR/PYL receptors are shown in FIGS. 2 and 3. As an example, SEQ ID NOS:155-361 represent maize PYR/PYL polypeptides containing the hypersensitive mutations described herein. It will be appreciated that the polypeptides can be further mutated (e.g., with conservative mutations, e.g., outside active sites) without substantially affecting activity. Accordingly, in some embodiments, the hypersensitive polypeptides as described herein comprise a sequence substantially (e.g., at least 70%, 75%, 80%, 85%, 90%, 95%, 98%) identical to the entire sequence of one of SEQ ID NOs: 155-361.

[0092] The extent to which one or more amino acid substitutions in the PYR/PYL receptor activity renders the receptor hypersensitive to ABA can be quantitatively measured, for example by assaying phosphatase activity in the presence of ABA and the PYR/PYL receptor comprising one or more amino acid substitutions and comparing the phosphatase activity to that of a control PYR/PYL receptor. A control PYR/PYL receptor will typically be the wildtype PYR/PYL polypeptide most similar to the mutated a PYR/PYL polypeptide. In some embodiments, e.g., when the starting protein is not a wildtype PYR/PYL polypeptide, the control PYR/PYL polypeptide can be substantially identical (e.g., at least 90, 95, or 98% identical) to the test PYR/PYL polypeptide (i.e., suspected of being hypersensitive) and having the wildtype amino acid at the corresponding position. For example, if the mutant PYR/PYL receptor has a mutation of F61X, where X is any non-F amino acid, the control would have F61 at the same position but would otherwise be identical to the mutant PYR/PYL receptor. If the mutant PYR/PYL receptor has a mutation of V81X, where X is any non-V amino acid, the control would have V81 at the same position but would otherwise be identical to the mutant PYR/PYL receptor. If the mutant PYR/PYL receptor has a mutation of I110X, where X is any non-I, non-V amino acid, the control would have I110 or V at the same position but would otherwise be identical to the mutant PYR/PYL receptor. If the mutant PYR/PYL receptor has a mutation of E141X, where X is any non-E amino acid, the control would have E141 at the same position but would otherwise be identical to the mutant PYR/PYL receptor. If the mutant PYR/PYL receptor has a mutation of A160X, where X is any non-A, non-V amino acid, the control would have A160 or valine at the same position but would otherwise be identical to the mutant PYR/PYL receptor.

[0093] In some embodiments, a mutated PYR/PYL receptor polypeptide comprises two or more amino acid substitutions as described herein. In some embodiments, the two or more amino acid substitutions corresponding to, F61X, V81X, I110X, E141X, and A160X, in PYR1 as set forth in SEQ ID NO:1, where X is the amino acid indicated herein as resulting in hypersensitivity.

[0094] Embodiments of the present invention provide for use of the above proteins and/or nucleic acid sequences, encoding such polypeptides, in the methods and compositions (e.g., expression cassettes, transgenic plants, plants with in situ PYR/PYL modifications, etc.) of the present invention. The isolation of a polynucleotide sequence encoding a plant wild-type PYR/PYL receptor (e.g., from plants where PYR/PYL sequences have not yet been identified) may be accomplished by a number of techniques. For instance, oligonucleotide probes based on the PYR/PYL coding sequences disclosed (e.g., as listed in the SEQUENCE LISTING) here can be used to identify the desired wild-type PYR/PYL gene in a cDNA or genomic DNA library. To construct genomic libraries, large segments of genomic DNA are generated by random fragmentation, e.g., using restriction endonucleases, and are ligated with vector DNA to form concatemers that can be packaged into the appropriate vector. To prepare a cDNA library, mRNA is isolated from the desired tissue, such as a leaf from a particular plant species, and a cDNA library containing the gene transcript of interest is prepared from the mRNA. Alternatively, cDNA may be prepared from mRNA extracted from other tissues in which PYR/PYL gene is expressed.

[0095] The cDNA or genomic library can then be screened using a probe based upon the sequence of a PYR/PYL gene disclosed here. Probes may be used to hybridize with genomic DNA or cDNA sequences to isolate homologous genes in the same or different plant species. Alternatively, antibodies raised against a polypeptide can be used to screen an mRNA expression library.

[0096] Alternatively, the nucleic acids encoding PYR/PYL can be amplified from nucleic acid samples using amplification techniques. For instance, polymerase chain reaction (PCR) technology can be used to amplify the coding sequences of PYR/PYL directly from genomic DNA, from cDNA, from genomic libraries or cDNA libraries. PCR and other in vitro amplification methods may also be useful, for example, to clone polynucleotide sequences encoding PYR/PYL to be expressed, to make nucleic acids to use as probes for detecting the presence of the desired mRNA in samples, for nucleic acid sequencing, or for other purposes. For a general overview of PCR see PCR Protocols: A Guide to Methods and Applications (Innis, M., Gelfand, D., Sninsky, J. and White, T., eds.), Academic Press, San Diego (1990). Appropriate primers and probes for identifying sequences from plant tissues are generated from comparisons of the sequences provided here with other related genes.

[0097] In some embodiments, the partial or entire genome of a number of plants has been sequenced and open reading frames identified. By a BLAST search, one can identify the coding sequence for wild-type PYR/PYL in various plants.

### III. Methods of Making Hypersensitive PYR/PYL Receptor Polypeptides

[0098] In another aspect, the present invention provides for methods of making ABA hypersensitive PYR/PYL receptor polypeptides comprising one or more amino acid substitutions. In some embodiments, the method comprises mutagenizing a wild-type PYR/PYL receptor and determining whether the mutagenized PYR/PYL receptor is hypersensitive to ABA.

[0099] Mutated PYR/PYL receptor polypeptides can be constructed by mutating the DNA sequences that encode the corresponding wild-type PYR/PYL receptor polypeptide (e.g., a wild-type PYR/PYL polypeptide of any of SEQ ID NOs:1-119, having any of SEQ ID NO:s 120-123, or a corresponding variant from which the mutant PYR/PYL receptor polypeptide of the invention is derived), such as by using site-directed or random mutagenesis. Nucleic acid molecules encoding the wild-type PYR/PYL receptor polypeptide can be mutated by a variety of polymerase chain reaction (PCR) techniques well-known to one of ordinary skill in the art. (See, e.g., PCR Strategies (M. A. Innis, D. H. Gelfand, and J. J. Sninsky eds., 1995, Academic Press, San Diego, Calif.) at Chapter 14; PCR Protocols: A Guide to Methods and Applications (M. A. Innis, D. H. Gelfand, J. J. Sninsky, and T. J. White eds., Academic Press, N Y, 1990).

[0100] As a non-limiting example, mutagenesis may be accomplished using site-directed mutagenesis, in which point mutations, insertions, or deletions are made to a DNA template. Kits for site-directed mutagenesis are commercially available, such as the QuikChange Site-Directed Mutagenesis Kit (Stratagene). Briefly, a DNA template to be mutagenized is amplified by PCR according to the manufacturer's instructions using a high-fidelity DNA polymerase (e.g., Pfu Turbo™) and oligonucleotide primers containing the desired mutation. Incorporation of the oligonucleotides generates a mutated plasmid, which can then be transformed into suitable cells (e.g., bacterial or yeast cells) for subsequent screening to confirm mutagenesis of the DNA.

[0101] As another non-limiting example, mutagenesis may be accomplished by means of error-prone PCR amplification (ePCR), which modifies PCR reaction conditions (e.g., using error-prone polymerases, varying magnesium or manganese concentration, or providing unbalanced dNTP ratios) in order to promote increased rates of error in DNA replication. Kits for ePCR mutagenesis are commercially available, such as the GeneMorph® PCR Mutagenesis kit (Stratagene) and Diversify® PCR Random Mutagenesis Kit (Clontech). Briefly, DNA polymerase (e.g., Taq polymerase), salt (e.g., MgCl2, MgSO4, or MnSO4), dNTPs in unbalanced ratios, reaction buffer, and DNA template are combined and subjected to standard PCR amplification according to manufacturer's instructions. Following ePCR amplification, the reaction products are cloned into a suitable vector to construct a mutagenized library, which can then be transformed into suitable cells (e.g., yeast cells) for subsequent screening (e.g., via a two-hybrid screen) as described below.

[0102] Alternatively, mutagenesis can be accomplished by recombination (i.e. DNA shuffling). Briefly, a shuffled mutant library is generated through DNA shuffling using in vitro homologous recombination by random fragmentation of a parent DNA followed by reassembly using PCR, resulting in randomly introduced point mutations. Methods of performing DNA shuffling are known in the art (see, e.g., Stebel, S. C. et al., Methods Mol Biol 352:167-190 (2007)).

[0103] Optionally, multiple rounds of mutagenesis may be performed in order to improve the efficiency of mutant proteins isolated. Thus, in some embodiments, PYR/PYL mutants isolated from ePCR and subsequent screening may be pooled and used as templates for later rounds of mutagenesis.

[0104] In some embodiments, the variants are generated by exposing a plant of plant seeds or cells to a mutagen selecting the plant or cell carrying a hypersensitive PYR/PYL polypeptide as described herein by phenotype or genotype. Examples of mutagens include, e.g., chemical mutagens (e.g., EMS) or radiological mutagens. Variants having a desired mutation can be selected based on phenotype of genotype (e.g., by using TILLING techniques).

[0105] In some embodiments, the method comprises mutagenizing a wild-type PYR/PYL receptor in situ and determining whether the mutagenized PYR/PYL receptor is hypersensitive to ABA. Mutated PYR/PYL receptor polypeptides can be constructed by mutating the DNA sequences that encode the corresponding wild-type PYR/PYL receptor polypeptide (e.g., a wild-type PYR/PYL polypeptide of any of SEQ ID NOs:1-119, having any of SEQ ID NO:s 120-123, or a corresponding variant from which the mutant PYR/PYL receptor polypeptide of the invention is derived), such as by using site-directed or random mutagenesis.

### IV. Screening for Hypersensitive PYR/PYL Receptor Polypeptides

[0106] The hypersensitivity of the mutant PYR/PYL receptors described herein can be measured in several alternative ways. When expressed in yeast, most wild-type PYR/PYL receptors will only bind to the type 2 protein phosphatase (PP2C) HAB1 (or other PP2Cs) when the appropriate yeast cells are grown in the presence of ABA. Thus, in some embodiments, hypersensitivity can be measured by determining the ability of a PYR/PYL mutant receptor, expressed in yeast, to bind to and inactivate PP2C in yeast to a greater extent than a control PYR/PYL receptor expressed in yeast. In some embodiments, the hypersensitive mutant PYR/PYL receptor comprises mutations that result in the mutated receptor inhibiting the activity of the PP2C in a phosphatase assay in the presence of ABA at least about 10%, at least about 20%, at least about 30%, at least about 40%, at least about 50%, at least about 60%, at least about 70%, at least about 80% or more as compared to a wild-type or other control PYR/PYL receptor in the presence of the same concentration of ABA. Several test concentrations ranging from low nM to low μM could be conducted to infer IC₅₀ values and the IC₅₀ values of hypersensitive mutants are substantially lower than appropriate wild type controls.

[0107] Alternatively, cell-based or plant-based methods of screening can be used. For example, cells that naturally express a wild-type PYR/PYL receptor polypeptide or that recombinantly express a wild-type or mutated PYR/PYL receptor polypeptide can be used. In some embodiments, the cells used are plant cells, animal cells, bacterial cells, fungal cells, including but not limited to yeast cells, insect cells, or mammalian cells. In general terms, the screening methods involve comparing the activity of a mutated PYR/PYL receptor polypeptide to the activity of a wild-type PYR/PYL receptor polypeptide in the presence of ABA, e.g., by comparing ABA-regulated gene expression in the wild-type and mutant PYR/PYL receptor-expressing cells or plants.

[0108] One exemplary assay involves testing whether a mutated PYR/PYL receptor can bind to a type 2 protein phosphatase (PP2C) (e.g., Homology to ABI1 (HAB1)) in the presence of ABA. Binding assays can involve contacting a mutated PYR/PY1 receptor polypeptide with a PP2C and allowing sufficient time for the PYR/PYL receptor and PP2C to form a binding complex. Any binding complexes formed can be detected using any of a number of established analytical techniques. Protein binding assays include, but are not limited to, methods that measure co-precipitation or co-migration on non-denaturing SDS-polyacrylamide gels, and co-migration on Western blots (see, e.g., Bennet, J. P. and Yamamura, H. I. (1985) “Neurotransmitter, Hormone or Drug Receptor Binding Methods,” in Neurotransmitter Receptor Binding (Yamamura, H. I., et al., eds.), pp. 61-89. Other binding assays involve the use of mass spectrometry or NMR techniques to identify molecules bound to the PYR/PYL polypeptide. The PYR/PYL polypeptide protein utilized in such assays can be naturally expressed, cloned or synthesized.

[0109] In some embodiments, mammalian or yeast two-hybrid approaches (see, e.g., Bartel, P. L. et. al. Methods Enzymol, 254:241 (1995)) can be used to identify polypeptides or other molecules that interact or bind when expressed together in a cell. In some embodiments, a hypersensitive PYR/PYL polypeptide is identified in a two-hybrid assay between a PYR/PYL polypeptide and a PP2C polypeptide, wherein the PYR/PYL polypeptide and the PP2C bind in the presence of ABA.

[0110] In another exemplary assay, the level of basal activity of a mutated PYR/PYL receptor polypeptide (i.e., level of activity in the absence of ABA) can be determined using an enzymatic phosphatase assay, in which the PYR/PYL receptor and PP2C are incubated in the presence of ABA. In this type of assay, a decrease in phosphatase activity in the presence of ABA to a greater extent than occurred for a control PYR/PYL receptor is indicative of hypersensitive PYR/PYL receptor. A decrease in phosphatase activity can be determined and quantified using any detection reagent known in the art, e.g., a colorimetric detection reagent such as para-nitrophenylphosphate.

[0111] Hypersensitive PYR/PYL receptor polypeptides that are initially identified by any of the foregoing screening methods can be further tested to validate the apparent activity and/or determine other biological effects of the hypersensitive PYR/PYL receptor polypeptide. In some cases, the PYR/PYL receptor polypeptide is tested for the ability to affect plant stress (e.g., drought tolerance and/or high salt tolerance), seed germination, or another phenotype affected by ABA. A number of such assays and phenotypes are known in the art and can be employed according to the methods of the invention.

### V. Recombinant Expression Vectors

[0112] Once a polynucleotide encoding a mutated PYR/PYL receptor polypeptide is obtained, it can also be used to prepare an expression cassette for expressing the mutated PYR/PYL receptor polypeptide in a transgenic plant, directed by a heterologous promoter. Increased expression of mutated PYR/PYL polynucleotide is useful, for example, to produce plants that selectively activate PYR/PYL receptors, thus enhancing stress tolerance.

[0113] Any of a number of means well known in the art can be used to drive mutated PYR/PYL activity or expression in plants. Any organ can be targeted, such as shoot vegetative organs/structures (e.g. leaves, stems and tubers), roots, flowers and floral organs/structures (e.g. bracts, sepals, petals, stamens, carpels, anthers and ovules), seed (including embryo, endosperm, and seed coat) and fruit. Alternatively, the mutated PYR/PYL polynucleotide can be expressed specifically in certain cell and/or tissue types within one or more organs (e.g., guard cells in leaves using a guard cell-specific promoter). Alternatively, the mutated PYR/PYL polynucleotide can be expressed constitutively (e.g., using the CaMV 35S promoter).

[0114] To use a polynucleotide sequence for a mutated PYR/PYL receptor polypeptide in the above techniques, recombinant DNA vectors suitable for transformation of plant cells are prepared. Techniques for transforming a wide variety of higher plant species are well known and described in the technical and scientific literature. See, e.g., Weising et al. Ann. Rev. Genet. 22:421-477 (1988). A DNA sequence coding for the mutated PYR/PYL receptor polypeptide preferably will be combined with transcriptional and translational initiation regulatory sequences which will direct the transcription of the sequence from the gene in the intended tissues of the transformed plant.

[0115] For example, a plant promoter fragment may be employed to direct expression of the mutated PYR/PYL polynucleotide in all tissues of a regenerated plant. Such promoters are referred to herein as “constitutive” promoters and are active under most environmental conditions and states of development or cell differentiation. Examples of constitutive promoters include the cauliflower mosaic virus (CaMV) 35S transcription initiation region, the 1′- or 2′-promoter derived from T-DNA of Agrobacterium tumafaciens, and other transcription initiation regions from various plant genes known to those of skill.

[0116] Alternatively, the plant promoter may direct expression of the mutated PYR/PYL receptor protein in a specific tissue (tissue-specific promoters) or may be otherwise under more precise environmental control (inducible promoters). Examples of tissue-specific promoters under developmental control include promoters that initiate transcription only in certain tissues, such as leaves or guard cells (including but not limited to those described in WO 2005/085449; U.S. Pat. No. 6,653,535; Li et al., Sci China C Life Sci. 2005 April; 48(2):181-6; Husebye, et al., Plant Physiol, April 2002, Vol. 128, pp. 1180-1188; and Plesch, et al., Gene, Volume 249, Number 1, 16 May 2000, pp. 83-89(7)). Examples of environmental conditions that may affect transcription by inducible promoters include anaerobic conditions, elevated temperature, or the presence of light.

[0117] If proper protein expression is desired, a polyadenylation region at the 3′-end of the coding region should be included. The polyadenylation region can be derived from a naturally occurring PYR/PYL gene, from a variety of other plant genes, or from T-DNA.

[0118] The vector comprising the sequences (e.g., promoters or PYR/PYL coding regions) will typically comprise a marker gene that confers a selectable phenotype on plant cells. For example, the marker may encode biocide resistance, particularly antibiotic resistance, such as resistance to kanamycin, G418, bleomycin, hygromycin, or herbicide resistance, such as resistance to chlorosluforon or Basta.

[0119] In some embodiments, the mutated PYR/PYL nucleic acid sequence is expressed recombinantly in plant cells. A variety of different expression constructs, such as expression cassettes and vectors suitable for transformation of plant cells, can be prepared. Techniques for transforming a wide variety of higher plant species are well known and described in the technical and scientific literature. See, e.g., Weising et al. Ann. Rev. Genet. 22:421-477 (1988). A DNA sequence coding for a PYR/PYL protein can be combined with cis-acting (promoter) and transacting (enhancer) transcriptional regulatory sequences to direct the timing, tissue type and levels of transcription in the intended tissues of the transformed plant. Translational control elements can also be used.

[0120] Embodiments of the present invention also provide for a mutated PYR/PYL nucleic acid operably linked to a promoter which, in some embodiments, is capable of driving the transcription of the PYR/PYL coding sequence in plants. The promoter can be, e.g., derived from plant or viral sources. The promoter can be, e.g., constitutively active, inducible, or tissue specific. In construction of recombinant expression cassettes, vectors, transgenics, of the invention, a different promoters can be chosen and employed to differentially direct gene expression, e.g., in some or all tissues of a plant or animal.

### Constitutive Promoters

[0121] A fragment can be employed to direct expression of a mutated PYR/PYL nucleic acid in all transformed cells or tissues, e.g., as those of a regenerated plant. The term “constitutive regulatory element” means a regulatory element that confers a level of expression upon an operatively linked nucleic molecule that is relatively independent of the cell or tissue type in which the constitutive regulatory element is expressed. A constitutive regulatory element that is expressed in a plant generally is widely expressed in a large number of cell and tissue types. Promoters that drive expression continuously under physiological conditions are referred to as “constitutive” promoters and are active under most environmental conditions and states of development or cell differentiation.

[0122] A variety of constitutive regulatory elements useful for ectopic expression in a transgenic plant are well known in the art. The cauliflower mosaic virus 35S (CaMV 35S) promoter, for example, is a well-characterized constitutive regulatory element that produces a high level of expression in all plant tissues (Odell et al., Nature 313:810-812 (1985)). The CaMV 35S promoter can be particularly useful due to its activity in numerous diverse plant species (Benfey and Chua, Science 250:959-966 (1990); Futterer et al., Physiol. Plant 79:154 (1990); Odell et al., supra, 1985). A tandem 35S promoter, in which the intrinsic promoter element has been duplicated, confers higher expression levels in comparison to the unmodified 35S promoter (Kay et al., Science 236:1299 (1987)). Other useful constitutive regulatory elements include, for example, the cauliflower mosaic virus 19S promoter; the Figwort mosaic virus promoter; and the nopaline synthase (nos) gene promoter (Singer et al., Plant Mol. Biol. 14:433 (1990); An, Plant Physiol. 81:86 (1986)).

[0123] Additional constitutive regulatory elements including those for efficient expression in monocots also are known in the art, for example, the pEmu promoter and promoters based on the rice Actin-1 5′ region (Last et al., Theor. Appl. Genet. 81:581 (1991); Mcelroy et al., Mol. Gen. Genet. 231:150 (1991); Mcelroy et al., Plant Cell 2:163 (1990)). Chimeric regulatory elements, which combine elements from different genes, also can be useful for ectopically expressing a nucleic acid molecule encoding a mutated PYR/PYL receptor protein (Comai et al., Plant Mol. Biol. 15:373 (1990)).

[0124] Other examples of constitutive promoters include the 1′- or 2′-promoter derived from T-DNA of Agrobacterium tumafaciens (see, e.g., Mengiste (1997) supra; O'Grady (1995) Plant Mol. Biol. 29:99-108); actin promoters, such as the Arabidopsis actin gene promoter (see, e.g., Huang (1997) Plant Mol. Biol. 1997 33:125-139); alcohol dehydrogenase (Adh) gene promoters (see, e.g., Millar (1996) Plant Mol. Biol. 31:897-904); ACT11 from Arabidopsis (Huang et al. Plant Mol. Biol. 33:125-139 (1996)), Cat3 from Arabidopsis (GenBank No. U43147, Zhong et al., Mol. Gen. Genet. 251:196-203 (1996)), the gene encoding stearoyl-acyl carrier protein desaturase from Brassica napus (Genbank No. X74782, Solocombe et al. Plant Physiol. 104:1167-1176 (1994)), GPc1 from maize (GenBank No. X15596, Martinez et al. J. Mol. Biol 208:551-565 (1989)), Gpc2 from maize (GenBank No. U45855, Manjunath et al., Plant Mol. Biol. 33:97-112 (1997)), other transcription initiation regions from various plant genes known to those of skill. See also Holtorf Plant Mol. Biol. 29:637-646 (1995).

### Inducible Promoters

[0125] Alternatively, a plant promoter may direct expression of the mutated PYR/PYL polynucleotide under the influence of changing environmental conditions or developmental conditions. Examples of environmental conditions that may affect transcription by inducible promoters include anaerobic conditions, elevated temperature, drought, or the presence of light. Such promoters are referred to herein as “inducible” promoters. In some embodiments, an inducible promoter is one that is induced by one or more environmental stressors, including but not limited to, drought, freezing cold, and high salt. For example, the invention can incorporate a drought-specific promoter such as a drought-inducible promoter of maize (e.g., the maize rab17 drought-inducible promoter (Vilardell et al. (1991) Plant Mol. Biol. 17:985-993; Vilardell et al. (1994) Plant Mol. Biol. 24:561-569)); or alternatively a cold, drought, and high salt inducible promoter from potato (Kirch (1997) Plant Mol. Biol. 33:897-909) or from Arabidopsis (e.g., the rd29A promoter (Kasuga et al. (1999) Nature Biotechnology 17:287-291). Other environmental stress-inducible promoters include promoters from the following genes: Rab21, Wsi18, Lea3, Uge1, Dip1, and R1G1B in rice (Yi et al. (2010) Planta 232:743-754).

[0126] In some embodiments, a plant promoter is a stress-inducible promoter (e.g., a drought-, cold-, or salt-inducible promoter) that comprises a dehydration-responsive element (DRE) and/or an ABA-responsive element (ABRE), including but not limited to the rd29A promoter.

[0127] Alternatively, plant promoters which are inducible upon exposure to plant hormones, such as auxins, are used to express the mutated PYR/PYL polynucleotide. For example, the invention can use the auxin-response elements E1 promoter fragment (AuxREs) in the soybean (Glycine max L.) (Liu (1997) Plant Physiol. 115:397-407); the auxin-responsive Arabidopsis GST6 promoter (also responsive to salicylic acid and hydrogen peroxide) (Chen (1996) Plant J. 10: 955-966); the auxin-inducible parC promoter from tobacco (Sakai (1996) 37:906-913); a plant biotin response element (Streit (1997) Mol. Plant Microbe Interact. 10:933-937); and, the promoter responsive to the stress hormone abscisic acid (Sheen (1996) Science 274:1900-1902).

[0128] Plant promoters inducible upon exposure to chemicals reagents that may be applied to the plant, such as herbicides or antibiotics, are also useful for expressing the mutated PYR/PYL polynucleotide. For example, the maize In2-2 promoter, activated by benzenesulfonamide herbicide safeners, can be used (De Veylder (1997) Plant Cell Physiol. 38:568-577); application of different herbicide safeners induces distinct gene expression patterns, including expression in the root, hydathodes, and the shoot apical meristem. A PYR/PYL coding sequence can also be under the control of, e.g., a tetracycline-inducible promoter, e.g., as described with transgenic tobacco plants containing the Avena sativa L. (oat) arginine decarboxylase gene (Masgrau (1997) Plant J. 11:465-473); or, a salicylic acid-responsive element (Stange (1997) Plant J. 11:1315-1324; Uknes et al., Plant Cell 5:159-169 (1993); Bi et al., Plant J. 8:235-245 (1995)).

[0129] Examples of useful inducible regulatory elements include copper-inducible regulatory elements (Mett et al., Proc. Natl. Acad. Sci. USA 90:4567-4571 (1993); Furst et al., Cell 55:705-717 (1988)); tetracycline and chlor-tetracycline-inducible regulatory elements (Gatz et al., Plant J. 2:397-404 (1992); Röder et al., Mol. Gen. Genet. 243:32-38 (1994); Gatz, Meth. Cell Biol. 50:411-424 (1995)); ecdysone inducible regulatory elements (Christopherson et al., Proc. Natl. Acad. Sci. USA 89:6314-6318 (1992); Kreutzweiser et al., Ecotoxicol. Environ. Safety 28:14-24 (1994)); heat shock inducible regulatory elements (Takahashi et al., Plant Physiol. 99:383-390 (1992); Yabe et al., Plant Cell Physiol. 35:1207-1219 (1994); Ueda et al., Mol. Gen. Genet. 250:533-539 (1996)); and lac operon elements, which are used in combination with a constitutively expressed lac repressor to confer, for example, IPTG-inducible expression (Wilde et al., EMBO J. 11:1251-1259 (1992)). An inducible regulatory element useful in the transgenic plants of the invention also can be, for example, a nitrate-inducible promoter derived from the spinach nitrite reductase gene (Back et al., Plant Mol. Biol. 17:9 (1991)) or a light-inducible promoter, such as that associated with the small subunit of RuBP carboxylase or the LHCP gene families (Feinbaum et al., Mol. Gen. Genet. 226:449 (1991); Lam and Chua, Science 248:471 (1990)).

### Tissue-Specific Promoters

[0130] Alternatively, the plant promoter may direct expression of the mutated PYR/PYL polynucleotide in a specific tissue (tissue-specific promoters). Tissue specific promoters are transcriptional control elements that are only active in particular cells or tissues at specific times during plant development, such as in vegetative tissues or reproductive tissues.

[0131] Examples of tissue-specific promoters under developmental control include promoters that initiate transcription only (or primarily only) in certain tissues, such as vegetative tissues, e.g., roots or leaves, or reproductive tissues, such as fruit, ovules, seeds, pollen, pistols, flowers, or any embryonic tissue, or epidermis or mesophyll. Reproductive tissue-specific promoters may be, e.g., ovule-specific, embryo-specific, endosperm-specific, integument-specific, seed and seed coat-specific, pollen-specific, petal-specific, sepal-specific, or some combination thereof. In some embodiments, the promoter is cell-type specific, e.g., guard cell-specific.

[0132] Epidermal-specific promoters include, for example, the Arabidopsis LTP1 promoter (Thoma et al. (1994) Plant Physiol. 105(1):35-45), the CER1 promoter (Aarts et al. (1995) Plant Cell 7:2115-27), and the CER6 promoter (Hooker et al. (2002) Plant Physiol 129:1568-80), and the orthologous tomato LeCER6 (Vogg et al. (2004) J. Exp Bot. 55:1401-10).

[0133] Guard cell-specific promoters include, for example, the DGP1 promoter (Li et al. (2005) Science China C Life Sci. 48:181-186).

[0134] Other tissue-specific promoters include seed promoters. Suitable seed-specific promoters are derived from the following genes: MAC1 from maize (Sheridan (1996) Genetics 142:1009-1020); Cat3 from maize (GenBank No. L05934, Abler (1993) Plant Mol. Biol. 22:10131-1038); vivparous-1 from Arabidopsis (Genbank No. U93215); atmyc1 from Arabidopsis (Urao (1996) Plant Mol. Biol. 32:571-57; Conceicao (1994) Plant 5:493-505); napA from Brassica napus (GenBank No. J02798, Josefsson (1987) JBL 26:12196-1301); and the napin gene family from Brassica napus (Sjodahl (1995) Planta 197:264-271).

[0135] A variety of promoters specifically active in vegetative tissues, such as leaves, stems, roots and tubers, can also be used to express polynucleotides encoding mutated PYR/PYL receptor polypeptides. For example, promoters controlling patatin, the major storage protein of the potato tuber, can be used, see, e.g., Kim (1994) Plant Mol. Biol. 26:603-615; Martin (1997) Plant J. 11:53-62. The ORF13 promoter from Agrobacterium rhizogenes that exhibits high activity in roots can also be used (Hansen (1997) Mol. Gen. Genet. 254:337-343. Other useful vegetative tissue-specific promoters include: the tarin promoter of the gene encoding a globulin from a major taro (Colocasia esculenta L. Schott) corm protein family, tarin (Bezerra (1995) Plant Mol. Biol. 28:137-144); the curculin promoter active during taro corm development (de Castro (1992) Plant Cell 4:1549-1559) and the promoter for the tobacco root-specific gene TobRB7, whose expression is localized to root meristem and immature central cylinder regions (Yamamoto (1991) Plant Cell 3:371-382).

[0136] Leaf-specific promoters, such as the ribulose biphosphate carboxylase (RBCS) promoters, can also be used. For example, the tomato RBCS1, RBCS2 and RBCS3A genes are expressed in leaves and light-grown seedlings, only RBCS1 and RBCS2 are expressed in developing tomato fruits (Meier (1997) FEBS Lett. 415:91-95). A ribulose bisphosphate carboxylase promoters expressed almost exclusively in mesophyll cells in leaf blades and leaf sheaths at high levels, described by Matsuoka (1994) Plant J. 6:311-319, can be used. Another leaf-specific promoter is the light harvesting chlorophyll a/b binding protein gene promoter, see, e.g., Shiina (1997) Plant Physiol. 115:477-483; Casal (1998) Plant Physiol. 116:1533-1538. The Arabidopsis thaliana myb-related gene promoter (Atmyb5) described by Li (1996) FEBS Lett. 379:117-121, is leaf-specific. The Atmyb5 promoter is expressed in developing leaf trichomes, stipules, and epidermal cells on the margins of young rosette and cauline leaves, and in immature seeds. Atmyb5 mRNA appears between fertilization and the 16 cell stage of embryo development and persists beyond the heart stage. A leaf promoter identified in maize by Busk (1997) Plant J. 11:1285-1295, can also be used.

[0137] Another class of useful vegetative tissue-specific promoters are meristematic (root tip and shoot apex) promoters. For example, the “SHOOTMERISTEMLESS” and “SCARECROW” promoters, which are active in the developing shoot or root apical meristems, described by Di Laurenzio (1996) Cell 86:423-433; and, Long (1996) Nature 379:66-69; can be used. Another useful promoter is that which controls the expression of 3-hydroxy-3-methylglutaryl coenzyme A reductase HMG2 gene, whose expression is restricted to meristematic and floral (secretory zone of the stigma, mature pollen grains, gynoecium vascular tissue, and fertilized ovules) tissues (see, e.g., Enjuto (1995) Plant Cell. 7:517-527). Also useful are kn1-related genes from maize and other species which show meristem-specific expression, see, e.g., Granger (1996) Plant Mol. Biol. 31:373-378; Kerstetter (1994) Plant Cell 6:1877-1887; Hake (1995) Philos. Trans. R. Soc. Lond. B. Biol. Sci. 350:45-51. For example, the Arabidopsis thaliana KNAT1 promoter (see, e.g., Lincoln (1994) Plant Cell 6:1859-1876).

[0138] One of skill will recognize that a tissue-specific promoter may drive expression of operably linked sequences in tissues other than the target tissue. Thus, as used herein a tissue-specific promoter is one that drives expression preferentially in the target tissue, but may also lead to some expression in other tissues as well.

[0139] In another embodiment, the mutated PYR/PYL polynucleotide is expressed through a transposable element. This allows for constitutive, yet periodic and infrequent expression of the constitutively active polypeptide. The invention also provides for use of tissue-specific promoters derived from viruses including, e.g., the tobamovirus subgenomic promoter (Kumagai (1995) Proc. Natl. Acad. Sci. USA 92:1679-1683; the rice tungro bacilliform virus (RTBV), which replicates only in phloem cells in infected rice plants, with its promoter which drives strong phloem-specific reporter gene expression; the cassava vein mosaic virus (CVMV) promoter, with highest activity in vascular elements, in leaf mesophyll cells, and in root tips (Verdaguer (1996) Plant Mol. Biol. 31:1129-1139).

### VI. Production of Plants Comprising Hypersensitive Mutations

[0140] In another aspect, the present invention provides for transgenic plants comprising recombinant expression cassettes for expressing a hypersensitive PYR/PYL receptor protein as described herein in a plant. In some embodiments, a transgenic plant is generated that contains a complete or partial sequence of a polynucleotide that is derived from a species other than the species of the transgenic plant. It should be recognized that transgenic plants encompass the plant or plant cell in which the expression cassette is introduced as well as progeny of such plants or plant cells that contain the expression cassette, including the progeny that have the expression cassette stably integrated in a chromosome.

[0141] A recombinant expression vector comprising a PYR/PYL coding sequence driven by a heterologous promoter may be introduced into the genome of the desired plant host by a variety of conventional techniques. For example, the DNA construct may be introduced directly into the genomic DNA of the plant cell using techniques such as electroporation and microinjection of plant cell protoplasts, or the DNA construct can be introduced directly to plant tissue using ballistic methods, such as DNA particle bombardment. Alternatively, the DNA construct may be combined with suitable T-DNA flanking regions and introduced into a conventional Agrobacterium tumefaciens host vector. The virulence functions of the Agrobacterium tumefaciens host will direct the insertion of the construct and adjacent marker into the plant cell DNA when the cell is infected by the bacteria. While transient expression of the constitutively active PYR/PYL receptor is encompassed by the invention, generally expression of construction of the invention will be from insertion of expression cassettes into the plant genome, e.g., such that at least some plant offspring also contain the integrated expression cassette.

[0142] Microinjection techniques are also useful for this purpose. These techniques are well known in the art and thoroughly described in the literature. The introduction of DNA constructs using polyethylene glycol precipitation is described in Paszkowski et al. EMBO J. 3:2717-2722 (1984). Electroporation techniques are described in Fromm et al. Proc. Natl. Acad. Sci. USA 82:5824 (1985). Ballistic transformation techniques are described in Klein et al. Nature 327:70-73 (1987).

[0143] Agrobacterium tumefaciens-mediated transformation techniques, including disarming and use of binary vectors, are well described in the scientific literature. See, for example, Horsch et al. Science 233:496-498 (1984), and Fraley et al. Proc. Natl. Acad. Sci. USA 80:4803 (1983).

[0144] Transformed plant cells derived by any of the above transformation techniques can be cultured to regenerate a whole plant that possesses the transformed genotype and thus the desired phenotype such as enhanced abiotic stress resistance. Such regeneration techniques rely on manipulation of certain phytohormones in a tissue culture growth medium, typically relying on a biocide and/or herbicide marker which has been introduced together with the desired nucleotide sequences. Plant regeneration from cultured protoplasts is described in Evans et al., Protoplasts Isolation and Culture, Handbook of Plant Cell Culture, pp. 124-176, MacMillilan Publishing Company, New York, 1983; and Binding, Regeneration of Plants, Plant Protoplasts, pp. 21-73, CRC Press, Boca Raton, 1985. Regeneration can also be obtained from plant callus, explants, organs, or parts thereof. Such regeneration techniques are described generally in Klee et al. Ann. Rev. of Plant Phys. 38:467-486 (1987).

[0145] One of skill will recognize that after the expression cassette is stably incorporated in transgenic plants and confirmed to be operable, it can be introduced into other plants by sexual crossing. Any of a number of standard breeding techniques can be used, depending upon the species to be crossed.

[0146] The expression cassettes of the invention can be used to confer abiotic stress resistance on essentially any plant. Thus, the invention has use over a broad range of plants, including species from the genera Asparagus, Atropa, Avena, Brassica, Citrus, Citrullus, Capsicum, Cucumis, Cucurbita, Daucus, Fragaria, Glycine, Gossypium, Helianthus, Heterocallis, Hordeum, Hyoscyamus, Lactuca, Linum, Lolium, Lycopersicon, Malus, Manihot, Majorana, Medicago, Nicotiana, Oryza, Panieum, Pannesetum, Persea, Pisum, Pyrus, Prunus, Raphanus, Secale, Senecio, Sinapis, Solanum, Sorghum, Trigonella, Triticum, Vitis, Vigna, and, Zea. In some embodiments, the plant is selected from the group consisting of rice, maize, wheat, soybeans, cotton, canola, turfgrass, and alfalfa. In some embodiments, the plant is an ornamental plant. In some embodiment, the plant is a vegetable- or fruit-producing plant.

[0147] Those of skill will recognize that a number of plant species can be used as models to predict the phenotypic effects of transgene expression in other plants. For example, it is well recognized that both tobacco (Nicotiana) and Arabidopsis plants are useful models of transgene expression, particularly in other dicots.

[0148] In some embodiments, the plants of the invention have enhanced ABA-mediated phenotypes, for example enhanced seed dormancy, as compared to plants that are otherwise identical except for expression of the hypersensitive PYR/PYL receptor polypeptide. Those of skill in the art will recognize that ABA is a well-studied plant hormone and that ABA mediates many changes in characteristics, any of which can be monitored to determine changes in phenotype. In some embodiments, an enhanced ABA-mediated phenotype is manifested by altered timing of seed germination or altered stress (e.g., drought, freezing cold, and/or salt) tolerance.

[0149] Abiotic stress resistance can be assayed according to any of a number of well-known techniques. For example, for drought tolerance, plants can be grown under conditions in which less than optimum water is provided to the plant. Drought resistance can be determined by any of a number of standard measures including turgor pressure, growth, yield, and the like. In some embodiments, a transgenic plant expressing a mutated PYR/PYL receptor as described herein has enhanced drought tolerance if the loss of turgor in the transgenic plant is reduced by at least about 10%, 15%, 20%, 25%, 30%, 40%, 50%, 60%, 70%, 80%, 90%, or more as compared to a non-transgenic control plant over a defined period of time (e.g., over the course of 5, 6, 7, 8, 9, 10, 11, 12, 13, 14 days or more, e.g., 3, 4, 5 weeks or more).

[0150] In some embodiments, the enhanced ABA-mediated phenotype is enhanced tolerance to moderate or high salinity. Salinity tolerance can be determined by any of a number of standard measures, including germination, growth, yield, or plant survival, leaf injury, premature loss of chlorophyll, and the like. In some embodiments, transgenic plants expressing a mutated PYR/PYL receptor as described herein have enhanced salt tolerance if the survival of the transgenic plants under moderate-salt or high-salt conditions (e.g., about 50 mM, 100 mM, 150 mM, 200 mM, 250 mM, 300 mM NaCl or higher) is increased by at least about 10%, 15%, 20%, 25%, 30%, 40%, 50%, 60%, 70%, 80%, 90%, or more as compared to a non-transgenic control plant over a defined period of time (e.g., over the course of 5, 6, 7, 8, 9, 10, 11, 12, 13, 14 days or more, e.g., 3, 4, 5 weeks or more).

[0151] Plant gene manipulations can now be precisely tailored in non-transgenic organisms using the CRISPR/Cas9 genome editing method. In this bacterial antiviral and transcriptional regulatory system, a complex of two small RNAs—the CRISPR-RNA (crRNA) and the transactivating crRNA (tracrRNA)—directs the nuclease (Cas9) to a specific DNA sequence complementary to the crRNA (Jinek, M., et al. Science 337, 816-821 (2012)). Binding of these RNAs to Cas9 involves specific sequences and secondary structures in the RNA. The two RNA components can be simplified into a single element, the single guide-RNA (sgRNA), which is transcribed from a cassette containing a target sequence defined by the user (Jinek, M., et al. Science 337, 816-821 (2012)). This system has been used for genome editing in humans, zebrafish, Drosophila, mice, nematodes, bacteria, yeast, and plants (Hsu, P. D., et al., Cell 157, 1262-1278 (2014)). In this system the nuclease creates double stranded breaks at the target region programmed by the sgRNA. These can be repaired by non-homologous recombination, which often yields inactivating mutations. The breaks can also be repaired by homologous recombination, which enables the system to be used for gene targeted gene replacement (Li, J.-F., et al. Nat. Biotechnol. 31, 688-691, 2013; Shan, Q., et al. Nat. Biotechnol. 31, 686-688, 2013). The hypersensitive mutations described in this application can be introduced into plants using the CAS9/CRISPR system.

[0152] Accordingly, in some embodiments, instead of generating a transgenic plant, a native PYR/PYR coding sequence in a plant or plant cell can be altered in situ to generate a plant or plant cell carrying a polynucleotide encoding a hypersensitive PYR/PYL polypeptide as described herein. For example, in some embodiments, CRISPR technology is used to introduce one or more nucleotide changes into a PYR/PYL coding sequence in situ to change the appropriate codon to make a change corresponding to F61X, V81X, I110X, or V163X of SEQ ID NO:1. The CRISPR/Cas system has been modified for use in prokaryotic and eukaryotic systems for genome editing and transcriptional regulation. The “CRISPR/Cas” system refers to a widespread class of bacterial systems for defense against foreign nucleic acid. CRISPR/Cas systems are found in a wide range of eubacterial and archaeal organisms. CRISPR/Cas systems include type I, II, and III sub-types. Wild-type type II CRISPR/Cas systems utilize the RNA-mediated nuclease, Cas9 in complex with guide and activating RNA to recognize and cleave foreign nucleic acid. Cas9 homologs are found in a wide variety of eubacteria, including, but not limited to bacteria of the following taxonomic groups: Actinobacteria, Aquificae, Bacteroidetes-Chlorobi, Chlamydiae-Verrucomicrobia, Chlroflexi, Cyanobacteria, Firmicutes, Proteobacteria, Spirochaetes, and Thermotogae. An exemplary Cas9 protein is the Streptococcus pyogenes Cas9 protein. Additional Cas9 proteins and homologs thereof are described in, e.g., Chylinksi, et al., RNA Biol. 2013 May 1; 10(5): 726-737; Nat. Rev. Microbiol. 2011 June; 9(6): 467-477; Hou, et al., Proc Natl Acad Sci USA. 2013 Sep. 24; 110(39):15644-9; Sampson et al., Nature. 2013 May 9; 497(7448):254-7; and Jinek, et al., Science. 2012 Aug. 17; 337(6096):816-21.

[0153] Accordingly, in one aspect, a method is provided of using CRISPR/CAS9 to introduce at least one of the mutation described herein into a plant cell is performed. In some embodiments, a method of altering a (e.g., native) nucleic acid encoding PYR/PYL polypeptide in a plant is provided. In some embodiments, the method comprises introducing into the plant cell containing and expressing a DNA molecule having a target nucleic acid encoding PYR/PYL polypeptide an engineered, non-naturally occurring Clustered Regularly Interspaced Short Palindromic Repeats (CRISPR)-CRISPR associated (Cas) (CRISPR-Cas) system. In some embodiments, the CRISPR-Cas system comprises one or more vectors comprising: a) a first regulatory element operable in a plant cell operably linked to at least one nucleotide sequence encoding a CRISPR-Cas system guide RNA that hybridizes with the target sequence, and b) a second regulatory element operable in a plant cell operably linked to a nucleotide sequence encoding a Type-II Cas9 protein, wherein components (a) and (b) are located on same or different vectors of the system, whereby the guide RNA targets the target sequence and the Cas9 protein cleaves the DNA molecule, whereby at least one of the hypersensitive mutations described herein is introduced into the target nucleic acid encoding the PYR/PYL polypeptide. In some embodiments, the PRY/PYL polypeptide is selected from any of SEQ ID NO:1, 2, 3, 4, 5, 6, 7, 8, 9, 10, 11, 12, 13, 14, 15, 16, 17, 18, 19, 20, 21, 22, 23, 24, 25, 26, 27, 28, 29, 30, 31, 32, 33, 34, 35, 36, 37, 38, 39, 40, 41, 42, 43, 44, 45, 46, 47, 48, 49, 50, 51, 52, 53, 54, 55, 56, 57, 58, 59, 60, 61, 62, 63, 64, 65, 66, 67, 68, 69, 70, 71, 72, 73, 74, 75, 76, 77, 78, 79, 80, 81, 82, 83, 84, 85, 86, 87, 88, 89, 90, 91, 92, 93, 94, 95, 96, 97, 98, 99, 100, 101, 102, 103, 104, 105, 106, 107, 108, 109, 110, 111, 112, 113, 114, 115, 116, 117, 118, or 119 or a substantially identical polypeptide. In some embodiments, the plant is from a genus selected from Asparagus, Atropa, Avena, Brassica, Citrus, Citrullus, Capsicum, Cucumis, Cucurbita, Daucus, Fragaria, Glycine, Gossypium, Helianthus, Heterocallis, Hordeum, Hyoscyamus, Lactuca, Linum, Lolium, Lycopersicon, Malta, Manihot, Majorana, Medicago, Nicotiana, Oryza, Panieum, Pannesetum, Persea, Pisum, Pyrus, Prunus, Raphanus, Secale, Senecio, Sinapis, Solanum, Sorghum, Trigonella, Triticum, Vitis, Vigna, and, Zea. In some embodiments, the plant is selected from the group consisting of rice, maize, wheat, and soybean. In some embodiments, the hypersensitive mutation introduced to the target nucleic acid is (corresponding to their position in Arabidopsis PYR1 (SEQ ID NO:1)): F61, V81, I110, E141, or A160 or a combination thereof. In some embodiments, no other mutations are introduced into the target nucleic acid. Also provided as a plant or plant cell resulting from the above-described method. Such a plant will contain a non-naturally-occurring nucleic acid sequence encoding the hypersensitive PYR/PYL polypeptide.

### VII. PYR/PYL Fusion Proteins

[0154] In some embodiments, the hypersensitive PYR/PYL polypeptides described herein are provided as fusion proteins, i.e., translational fusions with one or more fusion partner. In some embodiments, a hypersensitive PYR/PYL polypeptide is fused with a transcriptional activation or modulation domain. A non-limiting example of such a domain is VP16 or VP64. The fusion proteins can further comprise a nuclear localization signal sequence such that the fusion protein, when translated in a eukaryotic host cell, is localized to the cell nucleus. Also provided are polynucleotides encoding such fusion proteins as well as host cells comprising and expressing such polynucleotides. The polynucleotides in such instances will be heterologous to the host cell, i.e., will not be naturally occurring, for example transformed into the cell.

[0155] Such fusion proteins are useful, for example, in controlling eukaryotic gene expression in the cell when co-expressed with a sequence-specific DNA binding domain fused with) ABA INSENSITIVE 1 (ABI1) or other proteins having specific binding affinity for PYR/PYL proteins binding ABA. Exemplary sequence-specific DNA binding domains include, but are not limited to zinc-finger proteins, TALENS, transcription factor DNA binding domains, and RNA-guided DNA-binding domains of inactive Cas9 (dCas9). When both fusion proteins are co-expressed in the cell in the presence of ABA, the two fusion proteins will co-localized due to the binding of ABA1 to the ABA-binding PYR/PYL protein, thereby bringing the transcriptional activation or modulation domain in proximity to the target promoter, thereby regulating gene expression. Examples of systems and their use in gene regulation, are described in, e.g., Konermann et al., Nature 500:472-476 (2013) and Liang et al., Science Vol. 4 Issue 164 (2011).

### RNA Directed Genome Modification

[0156] In one aspect provided herein is a method for introducing a mutation in situ at a PYR/PYL mutation target site in a plant cell genome, as described herein. For example, in some embodiments, the PYR/PYL mutation target site comprises a nucleic acid that encodes for V89 of PYL-E or E149 of PYL. In certain embodiments the method comprises introducing into the plant cell: 1) a CRISPR ribonucleic acid (crRNA) that includes a sequence substantially identical to SEQ ID NOS: 363, 364, 365, 366, 367 or 369; 2) a transacting ribonucleic acid (tracRNA); 3) a nuclease (e.g., Cas9); and 4) a repair nucleic acid that can undergo homologous recombination that contains the mutation. According to the subject method, the crRNA and tracRNA directs the nuclease to the PYR/PYL mutation target site in a plant cell genome. Upon its recruitment, the nuclease (e.g., Cas9) creates a double strand break at the PYR/PYL mutation target site. The double strand break at the PYR/PYL mutation target site facilitates homologous recombination of the repair nucleic acid containing the mutation with a region of the plant cell genome that includes the PYR/PYL mutation target site, thereby introducing the mutation at the PYR/PYL mutation target site.

[0157] Mutations can be introduced into any suitable plant cell using the subject method. In some embodiments, the plant cell is a plant embryo. In certain embodiments, the plant cell is a maize plant cell.

[0158] Each component of the method can be introduced into the plant cell using any suitable method known in the art. In certain embodiments, the crRNA and tracRNA are introduced into the cell as an expression cassette containing a polynucleotide (i.e., DNA) encoding the crRNA and/or traRNA. In some embodiments, the expression cassette includes an RNA polymerase promoter operably linked to the polynucleotide encoding the crRNA and/or traRNA, thereby allowing transcription of the crRNA and/or traRNA. In some embodiments, the Cas9 is introduced into the cell as an expression vector containing a promoter operably linked to a polynucleotide encoding Cas9. Any suitable promoter can be used, including but not limtied to, the promoters described herein. In certain embodiments, the promoter is a ubiquitin-1 promoter (e.g., prUbi-10). DNA construct (.e.g, the expression cassettes and vectors described herein) can be introduced directly to plant tissue, for example, using ballistic methods, such as DNA particle bombardment.

[0159] Each of the crRNA, and the tracRNA, nuclease can be introduced separately or together as part of one expression vector into the cell of interest (e.g., a maize plant cell). In certain embodiments, the crRNA and the tracRNA are fused together to create a guide ribonucleic acid (gRNA). In some embodiments, the gRNA includes, from 5′ to 3′, a crNA linked to a tracRNA. In certain embodiments the crRNA, tracRNA, and nuclease (e.g., Cas9) are introduced together as nucleic acid cassettes included in one expression vector. Each component of the subject method is discussed in detail below.

### Guide RNA

[0160] In one aspect provided, provided herein is a guide RNA (gRNA) comprising a CRISPR ribonucleic acid (crRNA) and a transacting RNA (tracRNA).

[0161] The crRNA of the subject gRNA comprises a nucleotide sequence that is complementary to a sequence in a PYR/PYL mutation target site and includes a sequence that is substantially identical to SEQ ID NOS: 363, 364, 365, 366, 367 or 369. In certain embodiments, the crRNA has a sequence that is substantially identical to SEQ ID NOS: 363, 364, 365, 366, 367 or 369. The subject crRNAs provided herein are particularly useful for creating mutations at a PYR/PYL mutation target site that includes a nucleic acid encoding for an amino acid corresponding to V89 (SEQ ID NOS: 363, 364, 365, 366, 367) and E149 (SEQ ID NO:369) of PYL-E. As used herein, a “PYR/PYL mutation target site” refers to a region of a polynucleotide encoding for a PYR/PYL receptor that includes the site where a mutation is introduced by the subject method. The crRNA interacts with the PYR/PYL mutation target site in a sequence-specific manner by hybridization to a sequence in the PYR/PYL mutation target site (e.g., the complementary strand of the PYR/PYL mutation target site) and, together with the tracRNA of the gRNA, recruits Cas9 endonuclease to the PYR/PYL mutation target site. Cas9 endonuclease recruited by the gRNA to the PYR/PYL mutation target site introduces a double strand break in the PYR/PYL mutation target site. Any of the mutations described herein can be made in any wildtype PYR/PYL polypeptide. Analogous amino acid substitutions can be made, for example, in PYR/PYL receptors other than PYL-E by aligning the PYR/PYL receptor polypeptide sequence to be mutated with the PYL-E receptor polypeptide sequence. Analogous amino acid positions in PYR/PYL recetpros are shown in FIGS. 2 and 3.

[0162] In some embodiments, the PYR/PYL mutation target site has the sequence of SEQ ID NO: 362, which includes a nucleic acid encoding for V89 of PYL-E. In some embodiments, the PYR/PYL mutation target site has the sequence of SEQ ID NO:368, which includes a nucleic acid encoding for E149 of PYL-E.

[0163] In some embodiments, a crRNA has a length of 10 nucleotides (nt) to 100 nucleotides (nt). In some embodiments, the crRNA has a length of 15, 16, 17, 18, 19, 20, 21, 22, 23, 24, 25, 26, 27, 28, 29, 30 nt and includes a sequence that is substantially identical to SEQ ID NOS: 362, 363, 364, 365, 366 or 368. In some embodiments, the crRNA has a length of at least 17 nt. In some embodiments, the crRNA has a length of 17 nt to 18 nt, 17 nt to 19 nt, 17 nt to 20 nt, 17 nt to 21 nt, 17 nt to 22 nt, 17 nt to 23 nt, 17 nt to 24 nt, 17 nt to 25 nt, 17 nt to 30 nt, 17 nt to 35 nt, 17 nt to 40 nt, 17 nt to 45 nt, 17 nt to 50 nt, 17 nt to 55 nt, 17 nt to 60 nt, 17 nt to 65 nt, 17 nt to 70 nt, 17 nt to 75 nt, 17 nt to 80 nt, 17 nt to 85 nt, 17 nt to 90 nt, 17 nt to 95 nt, or 17 nt to 100 nt. In some embodiments, the crRNA has a length of 12 nt to 25 nt, 13 nt to 25 nt, 14 nt to 25 nt, 15 nt to 25 nt, 16 nt to 25 nt, 17 nt to 25 nt, 18 nt to 25 nt, 19 nt to 25 nt, 20 nt to 25 nt, 21 nt to 25 nt, or 22 nt to 25 nt.

[0164] In some embodiments, the crRNA is 17 nt in length, In some embodiments, the crRNA is 18 nt in length. In some embodiments, the crRNA is 19 nt in length. In some embodiments, the crRNA is 20 nt in length. In some embodiments, the crRNA is 21 nt in length. In some embodiments the crRNA is 22 nt in length. In some embodiments, the crRNA is 23 nt in length. In some embodiments, the crRNA is 24 nt in length. In some embodiments, the crRNA is 25 nt in length.

[0165] In some embodiments, the crRNA is at least 17 nt in length, In some embodiments, the crRNA is at least 18 nt in length. In some embodiments, the crRNA is at least 19 nt in length. In some embodiments, the crRNA is at least 20 nt in length. In some embodiments, the crRNA is at least 21 nt in length. In some embodiments the crRNA is at least 22 nt in length. In some embodiments, the crRNA is at least 23 nt in length. In some embodiments, the crRNA is at least 24 nt in length. In some embodiments, the crRNA is at least 25 nt in length.

[0166] In some embodiments, the guideRNA (gRNA) includes a transacting RNA (tracRNA). Transacting RNA of the subject guideRNA interacts with the crRNA to recruit a nuclease to the site of a PYR/PYL mutation target site. Upon its recruitment to the PYR/PYL mutation target site, the nuclease creates a double strand break (DSB) in the PYR/PYL mutation target site. Any suitable tracRNA capable of recruiting a Cas9 to a PYR/PYL mutation target site can be used with the subject gRNA. In some embodiments, the tracRNA is encoded by a nucleotide having a sequence that is substantially identical to SEQ ID NO: 370. In certain embodiments of the subject method, the tracRNA and the crRNA are introduced into the plant cells separately (e.g., on different expression vectors). In some embodiments, the tracRNA is linked to the crRNA and introduced into the plant cell as a guideRNA (gRNA).

[0167] In another aspect, provided herein is a nucleic acid that includes a polynucleotide encoding any of the subject gRNAs described herein.

[0168] In another aspect, provided herein is an expression cassette that includes an RNA polymerase promoter operably linked to any of the subject gRNAs described herein. Any suitable RNA polymerase promoter capable of driving transcription of the nucleic acid encoding the subject gRNA can be used. In some embodiments, the promoter is an inducible promoter, including, but not limited, to any of the inducible promoters described herein. In other embodiments, the promoter is a constitutive promoter, including, but not limited to any of the constitutive promoters described herein. In yet other embodiments, the promoter is a tissue-specific promoter, including, but not limited to, any of the tissue-specific promoters described herein. In certain embodiments, the RNA polymerase promoter is an RNA polymerase III (polIII) promoter. In particular embodiments, the polIII promoter is a U3 promoter or a U6 promoter. In certain embodiment, the expression cassette has the sequence of any one of SEQ ID NOS; 371-373.

Expression Vectors Including gRNA and Cas9 Nuclease

[0169] In another aspect, provided herein is an expression vector that includes one or more of the guide RNA (gRNA) expression cassettes provided herein and an expression cassette including a promoter operably linked to a polynucleotide encoding a CRISPR-associated endonuclease 9 (Cas9). In some embodiments, the promoter operably linked to the Cas9 is a ubiquitin-1 promoter (prUbi-10). In some embodiments, the expression includes an expression cassette containing a polynucleotide encoding a gRNA having a crRNA that is substantially identical to SEQ ID NOS: 363, 364, 365, 366, 367 (see, e.g., FIG. 5). In some embodiments, the expression vector includes an expression cassette containing a polynucleotide encoding a gRNA having a crRNA that is substantially identical to SEQ ID NOS: 369 (see, e.g., FIG. 6). In some embodiments, the expression vector includes a first expression cassette containing a polynucleotide encoding a gRNA having a crRNA that is substantially identical to SEQ ID NOS: 363, 364, 365, 366, 367; a second expression cassette containing a polynucleotide encoding a gRNA having a crRNA that is substantially identical to SEQ ID NO: 369; and a third expression cassette including a promoter operably linked to a polynucleotide encoding a CRISPR-associated endonuclease 9 (Cas9) (see, e.g., FIG. 7).

### Methods of Producing PYR/PYL Variant Plants Using RNA Directed Genome Modification

[0170] Expression vectors disclosed herein are useful, for example, for introducing a mutation in a plant in situ at a genomic PYR/PYL mutation target site. Thus, in another aspect, provided herein is a method for of producing a plant having a mutation at a genomic PYR/PYL mutation target site. In some embodiments, the method includes introducing into plant cells an expression vector encoding for a gRNA and Cas9 as disclosed herein and at least one repair nucleic acid comprising the mutation of interest. According to the subject method, the crRNA and tracRNA directs the nuclease to the PYR/PYL mutation target site in a plant cell genome. Upon its recruitment, the nuclease (e.g., Cas9) creates a double strand break at the PYR/PYL mutation target site. The double strand break at the PYR/PYL mutation target site facilitates homologous recombination of the repair nucleic acid containing the mutation of interest with a region of the plant cell genome that includes the PYR/PYL mutation target site, thereby introducing the mutation at the PYR/PYL mutation target site. In certain embodiments, the repair nucleic acid has a sequence that is substantially identical to any one of the sequence of SEQ ID NOS:374 to 378. In other embodiments, the repair nucleic acid has a sequence that is complementary to a sequence that is substantially identical to any one of the sequences of SEQ ID NOS:374 to 386. In specific embodiments, the repair nucleic acid has a sequence that is substantially identical to SEQ ID NO:376. In other embodiments, the repair nucleic acid has a sequence that is complementary to a sequence that is substantially identical to SEQ ID NO:376. In another embodiment, the repair nucleic acid has a sequence that is substantially identical to SEQ ID NO:378. In other embodiments, the repair nucleic acid has a sequence that is complementary to a sequence that is substantially identical to SEQ ID NO:378. In yet another embodiment of the method, two repair nucleic acids are introduced, where the repair nucleic acids have sequences that are substantially identical to SEQ ID NO:376 and SEQ ID NO:378. In another embodiment of the method, two repair nucleic acids are introduced, where the repair nucleic acids have sequences are complementary to sequences that are substantially identical to SEQ ID NO:376 and SEQ ID NO:378.

[0171] In certain embodiments, the method further includes the step of selecting plant cells having the mutation. Selection for mutation can be performed by any useful technique known in the art, including, but not limited PCR amplification followed by sequencing, capillary electrophoresis and Nuclease Serveyer assay. In some embodiments, the method is for the production of a maize plant.

[0172] In yet another aspect, provided herein is a kit for producing a plant having a mutation in a PYR/PYL nucleic acid as described herein. In some embodiments, the kit includes any one of the subject expression vectors disclosed herein and at least one repair nucleic acid, wherein the repair nucleic acid comprises a PYL-E mutation and is capable of introducing the PYL-E mutation in situ in a plant cell genome by homologous recombination upon a Cas9 cleavage event. In certain embodiments, the kit includes a repair nucleic acid that has a sequence that is substantially identical to SEQ ID NOS:374 to 386.

### EXAMPLES

[0173] The following examples are offered to illustrate, but not to limit the claimed invention.

[0174] The affinity of a receptor for a target ligand is typically determined by non-covalent interactions between ligand-binding residues and the ligand. Mutations in such residues can have negative, positive or neutral effects on the strength of the receptor-ligand interaction. The affinity of a receptor-ligand interaction is intrinsically correlated with the concentration of ligand required to elicit biological effects, with high affinity ligands requiring lower concentrations relative to low affinity ligands. A mutant receptor with increased affinity for a ligand can in some cases elicit greater biological effect relative to a wild type receptor, when both are activated under identical conditions by the same concentration of activating ligand. Thus, mutations that make a receptor hypersensitive to a ligand can be useful for engineering organisms that elicit stronger responses to the ligand relative to wild type. Furthermore, ABA hypersensitive plants possess enhanced ABA responses and improved drought tolerance (Wang, Y., et al. Plant J. 43, 413-424 (2005)). Based on these considerations, we set out to systematically establish specific ABA receptor mutations that increase ABA responsiveness. This was done by testing a collection of PYR1 variants with all possible single amino acid substitution mutations in ligand binding residues. Thus we conducted site-saturated mutagenesis of ABA-contacting residues, which we define as those that are within 5A or ABA or ABA-contacting water residues in available X-ray coordinates. This collection of mutants was constructed previously, as described in PCT Application No. PCT/US2012/043121 and Mosquna et al., Proc Natl Acad Sci USA 108: 20838-20843 (2011). This collection of mutants was made by mutagenizing a previously described pBD GAL-PYR1 template (Park, S.-Y., et al. Science 324, 1068-1071 (2011)). In response to ABA, this particular plasmid encodes a fusion protein that binds to a co-expressed GAL4 activation domain-HAB1 fusion protein, encoded by the plasmid pACT-HAB1. This binding reconstitutes a functional GAL4 transcriptional activator and subsequent transcription of a β-galactosidase reporter gene, which in turn enables colorimetric based detection of agonist promoted receptor-PP2C interaction when lysed cells are exposed to the substrate X-gal. The mutant clones were individually transformed into S. cerevisiae strain Y190 containing pACT-HAB1. Yeast transformants were selected for the presence of plasmids on synthetic dextrose (SD) agar plates lacking Leu and Trp (SD-LT) and examined for PP2C interactions by using X-gal staining to monitor β-gal reporter gene expression levels. Individual clones were arrayed into 96 well plates and then spotted onto SD-LT lawn (i.e. one-well) plates containing 0, 0.5 or 5.0 μM (+)-ABA. Each assay plate contained 95 mutant clones and one wild type PYR1 positive control clone. The spotted cells were cultured at 30° C. for 48 hours after which they were lysed by chloroform and stained with an X-gal solution, as previously described (Park, S.-Y., et al. (2009) Science 324, 1068-1071). Positive were defined as those mutants that displayed staining on 0.5 μM (+)-ABA but no staining on plates lacking (+)-ABA. After this initial screening exercise, all positives clones were retested on plates containing 0. 0.25, 0.5 and 1 μM (+)-ABA and stained for galactosidase activity as described above. Mutant clones showing detectable staining on 0.5 μM (+)-ABA or lower were scored as hypersensitive mutants. FIG. 1 depicts results of PYR1 mutant-HAB1 interactions as assayed in a yeast two-hybrid assay under different ABA concentrations, with darker spots indicating increased interaction. This data is also summarized below:

| | | | | | Minimal conc. |
|---|---|---|---|---|---|
| | | | | | For ABA |
| Mutant | SEQ ID NO: | Residue | WT AA | Mutant | response (μM) |
| WT | 1 | | | | 1 |
| F61L | 124 | 61 | F | L | 0.25 |
| F61M | 125 | 61 | F | M | 0.25 |
| V81I | 126 | 81 | V | I | 0.25 |
| V81Y | 127 | 81 | V | Y | 0.25 |
| I110C | 128 | 110 | I | C | 0.25 |
| I110S | 129 | 110 | I | S | 0.5 |
| E141C | 130 | 141 | E | C | 0.5 |
| E141I | 131 | 141 | E | I | 0.25 |
| E141L | 132 | 141 | E | L | 0.25 |
| E141M | 133 | 141 | E | M | 0.25 |
| E141N | 134 | 141 | E | N | 0.5 |
| E141T | 135 | 141 | E | T | 0.5 |
| E141V | 136 | 141 | E | V | 0.5 |
| E141W | 137 | 141 | E | W | 0.5 |
| E141Y | 138 | 141 | E | Y | 0.25 |
| A160C | 139 | 160 | A | C | 0.25 |
| A160I | 140 | 160 | A | I | 0.25 |
| A160V | 141 | 160 | A | V | 0.25 |

[0175] Highly Hypersensitive ABA Receptors Constructed by Combinatorial Mutagenesis

[0176] Additive or synergistic interactions between the single hypersensitive mutations identified can increase a receptor's sensitivity to ABA. To identify potentially beneficial combinations, we used combinatorial mutagenesis to construct receptors that contain combinations of subsets of the best single mutants identified and then screened these to identify receptors with increased sensitivity. Mutagenic primers complementary to the appropriate regions of PYR1 coding sequence were designed to enable the following mutations to be incorporated into a PYR1 template DNA: F61L, F61M, V81I, V81Y, I110C, I110S, E141I, E141L, E141M, E141Y, A160C, A160I, A160V. Equimolar concentrations of these primers were combined with a mixture of wild type primers for each target site (4 mol percent relative to the mutant primer pool) and the primer mix utilized with the QuickChange Lightning Multi Site-Directed PCR Mutagenesis kit (Agilent, USA) using the pBD-PYR1 template DNA. The use of wild type primers in the reaction mixtures enabled, in principle, all double, triple, quadruple and pentuple mutant combinations to be synthesized in the mutagenesis reaction. The reaction products were transformed into competent E. coli cells to yield a pool of ˜10,000 clones, which was then used to prepare plasmid DNA for the mutant library. The pool of mutant plasmids was subsequently introduced into the previously described pAD-HAB1 MAV99 reporter strain (Peterson, F. C., et al. (2010) Nature Structural & Molecular Biology 17, 1109-1113). In this reporter strain, a GAL4 promoter drives expression of a URA3 reporter gene in a genetic background where the endogenous URA3 gene is disrupted, which enables positive selections using uracil deficient media. Thus, mutant clones that encode receptors that can interact with HAB1 can be positively selected using this system. The transformed yeast cells containing the mutant receptor library were next plated onto growth medium lacking uracil and containing 50 nM ABA, a concentration of ABA that is too low to enable growth of control strains. 26 colonies with uracil-independent growth were identified, which were isolated and re-tested on medium lacking ABA to eliminate cones enabling ligand-independent (i.e. constitutive) interactions of receptor with HAB1. Plasmids from yeast cells containing non-constitutive receptors were isolated and sequenced, which revealed that the following 4 highly hypersensitive combination mutants had been isolated:

### PYR1F61L, A160C,

### PYR1F61M, A160V,

### PYR1F61M, I110S, A160V,

### PYR1F61L, V81I, I110C, A160V.

[0177] The plasmids for each of these mutants and their corresponding single mutations were transformed into the previously described yeast reporter strain, Y190 pAD-HAB1 (Park, S.-Y., et al. (2009) Science 324, 1068-1071). The transformed yeast cells were grown on selective media containing a range of ABA concentrations and cells lysed and stained to reveal β-galactosidase activity, as shown in FIG. 4.

[0178] Increased Affinity of a Mutant Hypersensitive Receptor

[0179] The ligand sensitivity of PYR1 and HAB1 yeast two hybrid strains generally correlates with receptor affinity. To examine if this was the case for the hypersensitive mutations identified by our functional screens, we conducted isothermal titration calorimetry (ITC) to measure the heat produced by a mutant receptor-ABA binding reaction and infer the ligand binding dissociation constant (Kd). The affinity of wild type PYR1 has been previously measured using ITC and estimated to be 97±36 μM (Dupeux et al. 2010). The PYR1-A160V mutant receptor was expressed in E. coli BL21(DE3) as a fusion to the small ubiquitin like protein SUMO, using the vector pSUMO (LifeSensors, USA), which improves the solubility of proteins in E. coli and contains an NH2-terminal hexa-histidine tag that facilitates purification using immobilized metal affinity chromatography (IMAC). PYR1 A160V was cloned into pSUMO by using PCR product generated from a pBD-PYR1(A160V) yeast two hybrid construct as template, and sequence validated. A short flexible linker and tobacco etch virus (TEV) protease cleavage site (sequence NH2-GGGSQFGSGGGGGSGSENLYFQS-COOH; SEQ ID NO:411) was incorporated in between the SUMO tag and the receptor to enable cleavage of the recombinant protein by TEV protease, which yields PYR1(A160V) plus an NH2-terminal QS appendage. Recombinant SUMO-TEV-PYR1 (A160V) protein was produced in E. coli and purified by immobilized metal affinity chromatography as previously described (Okamoto et al., Proceedings of the National Academy of Sciences of the United States of America 110, no. 29 (2013): 12132-12137). The purified fusion protein was digested with recombinant TEV protease according to established protocols, and the cleaved protein subsequently separated from both the SUMO tag and uncleaved protein by passing the cleavage reaction over an IMAC column, which does not retain the cleaved PYR1(A160V) product. The cleaved protein was purified by gel filtration using a Superdex column (GE Healthcare, USA) and concentrated by centrifugal concentration using Amicon filters (EMD, USA), as previously described (Dupeux et al, The EMBO Journal 30, no. 20 (2011): 4171-4184). The concentrated protein was utilized for ITC experiments, using a TA instruments Nano ITC Low Volume instrument, repeatedly injecting 2.5 μL of a 600 μM (+)-ABA solution into a reaction cell containing 60 μM PYR1(A160V) every 300 seconds for 200 minutes. Both the ABA and protein were dissolved in a buffer containing PBS, 1 mM 2-mercaptoethanol and 0.012% DMSO. The thermograms generated were processed using the instrument's software to a normalized fit single binding site model, which yielded a Kd of 1.5 μM and a binding stoichiometry of 1.068. These data demonstrate that the A160V mutation possesses increased ABA affinity relative to wild type PYR1, consistent with the increased sensitivity indicated by yeast two hybrid assays.

### Targeted Genome Modification

[0180] Non-transgenic plants harboring induced mutations in specific genes can be obtained in multiple ways. Chemical mutagenesis of an organism can be used to create random genome-wide mutations and populations of mutagenized individuals can be scanned using high-throughput mutation detection methods to identify individuals harboring specific mutations in genes of interest. For example, TILLING (Targeting Induced Local Lesions in Genomes) enables an investigator to identify non-naturally occurring induced-mutations in a gene by using PCR to amplify a gene of interest from 1000s of mutagenized individuals and use hetero-duplex specific nucleases, such as celery nuclease CEL1, to identify plants harboring a mutation in the PCR amplified region (McCallum, C. M., et al. (2000). Nat. Biotechnol. 18, 455-457). Many technologies are available for polymorphism identification in addition to endonucleases, including direct sequencing of PCR products obtained from mutagenized individuals.

[0181] To identify maize plants containing ABA receptors with increased sensitivity an EMS mutagenized population is created and from this population all ABA receptor genes are PCR amplified from 1000s of mutagenized plants. The amplified products are scanned for polymorphisms using TILLING methodology and polymorphic fragments identified are sequenced to define the specific mutations present. From this, individuals harboring mutations corresponding to the polymorphisms described in this application are identified.

[0182] The most likely mutants to be obtained using this strategy are those that can be encoded by a single nucleotide substitution, which can be established by examining the codon table. For example, receptors with mutations homologous to F61L or F61M in PYR1 can be obtained in receptor homologs by screening for different single nucleotide substitutions depending on the gene sequence, such as UUU->CUU, or UUC->CUC. The same is true for A160V (GCN->GUN), V81I (GUU->AUU, GUC->AUC, GUA->AUA), V81Y (GUU->UUU, GUC->UUC). In principle, any single mutation can be isolated by chemical mutagenesis TILLING, but in practice the subset of changes that can arise by a single nucleotide substitution are most likely to be obtained. The examples provided above are representative, not exhaustive, and other single nucleotide substitutions enabling desired mutations, such as E141V and I110S, are also possible.

[0183] Other mutation induction systems can be used to target mutations in specific genes, such as genome editing methods, which have the advantages of increasing the frequency of single and multiple mutations at a defined target site (Lozano-Juste, J., and Cutler, S. R. (2014) Trends in Plant Science 19, 284-287). The sequence-specific introduction of a double stranded DNA break (DSB) in a genome leads to the recruitment of DNA repair factors at the breakage site, which then repair lesion by either the error-prone non-homologous end joining (NHEJ) or homologous recombination (HR) pathways. NHEJ repairs the breaks, but is imprecise and often creates diverse mutations at and around the DSB. In cells in which the HR machinery repairs the DSB, sequences with homology flanking the DSB, including exogenously supplied sequences, can be incorporated at the region of the DSB. DSBs can therefore be leveraged by geneticists to increase the frequency of mutations at defined sites, however intrinsic differences between the relative roles of HR and NHEJ can affect the mutation types at a targets locus. A number of technologies have been developed to create DSBs at specific sites including synthetic zinc finger nucleases (ZFNs), transcription activator-like endonucleases (TALENs) and most recently the clustered regularly interspaced short palindromic repeats (CRISPR)/CRISPR-associated protein 9 (Cas9) system. This system is based on a bacterial immune system against invading bacteriophages in which a complex of 2 small RNAs, the CRISPR-RNA (crRNA) and the transactivating crRNA (tracrRNA) directs a nuclease (Cas9) to a specific DNA sequence complementary to the crRNA. Using any of these systems, an investigator can create DSBs at pre-determined sites in cells expressing the genome editing constructs. In order for homologous recombination to occur, a DNA cassette homologous to the targeted site must be provided, preferably at a high concentration so that HR is favored or NHEJ. Multiple strategies are conceivable for realizing this, including template delivery using agrobacterium mediated transformation or particle bombardment of DNA templates, and one recently described method uses a modified viral genome to provide the double stranded DNA template. For example, Baltes et al. 2014 (Baltes, N. J., et al. (2014) Plant Cell 26, 151-163) recently demonstrated that an engineered geminivirus that was introduced into plant cells using Agrobacterium mediated transformation could be engineered to produce DNA recombination templates in cells where a ZFN was co-expressed.

[0184] In some aspects, once DSBs have been created using any number of technologies, such sites can be exploited to facilitate isolation of targeted genetic changes by either homologous recombination of nucleotide substitutions, deletions or insertions. For example, ABA receptor genes can be targeted using genome editing technologies and progeny plants of the mutagenized plants be screened using the methods outlined above to identify mutations at sites that increase ABA sensitivity. Delivery of genome editing constructs into organisms can involve both unstable transient expression constructs or stable integration of constructs into genomes delivered by Agrobacterium mediated transformation. In the latter case, stable transgenic plants can be used to express genome-editing constructs in plants to increase mutation frequencies at the target site. Once the desired mutants are isolated through polymorphism scans (analogous to those used in TILLING), individuals can be back crossed wild type lines to segregate away transgenic insertion events.

[0185] Conceptually, these methods are analogous to TILLING and the methods for identifying defined mutations would be similar, however because of the targeted nature of these methods, the frequency of mutations at defined sites will be higher and mutations involving changes of more than a single base pair can be identified more readily.

### Targeted Amino Acid Modification of Maize ABA Receptors Mediated by CRISPR-Cas9

### 1. Maize ABA Receptor (ZmPYL) Target Gene Modification

[0186] In vivo modification of plant ABA receptors is described using maize ZmPYL genes as an example. Maize genome contains more than 10 ABA receptors (ZmPYL-A to ZmPYL-P) that share several highly conserved amino acids with AtPYL1. To obtain ABA hypersensitive mutations in the endogenous ZmPYL-E (GRMZM2G165567) gene, two amino acids (V89 and E149) are chosen as targets for sequence-specific mutagenesis into desired mutant amino acids, alanine and leucine (V89A and E149L), respectively, using homology-directed gene repair mediated by sequence-specific nucleases and donor DNA template. Currently, there are several technology platforms for making sequence-specific nucleases, including for example zinc-finger nuclease, TALE nuclease, CRISPR-Cas9 and engineered meganuclease (Puchta and Fauser (2014), Synthetic nucleases for genome engineering in plants: prospects for a bright future. Plant Journal 78:727-741; Chen and Gao (2014) Targeted genome modification technologies and their applications in crop improvements. Plant Cell Rep. 33:575-583), any of which can be used to produce a plant comprising an in situ hypersensitive mutation in a genomic coding sequence PYR/PYL polypeptide as described herein.

[0187] The following examples describe the use of CRISPR-Cas9 system for making targeted gene modification in endogenous ZmPYL-E gene. CRISPR-Cas9-mediated gene modification requires these components: Cas9 nuclease, crRNA (CRISPR RNA) recognizing the mutagenesis target, tracRNA (transactivating RNA) and repair donor DNA template molecule. For easiness of use, crRNA and tracRNA are fused and delivered as a single guide RNA molecule (gRNA or sgRNA) [Sander and Joung (2014) CRISPR-Cas systems for editing, regulating and targeting genomes. 32:347-355].

### 2. Optimization of Cas9 and its Expression in Maize Cells

[0188] In order to achieve good expression in maize cells, Type II Cas9 gene from Streptococcus pyogenes SF370 is optimized with maize-preferred codons. Nuclear localization signal is also incorporated into the C-terminus of Cas9 to improve its targeting to nucleus. Below is the optimized Cas9 sequence (cBCas9Nu-01, aka, cCas9-01). To express Cas9 in maize cells, the maize-optimized Cas9 gene (cBCas9Nu-01) is placed under the control of maize ubiquitin-1 promoter (prUbi1-10) and is followed by a terminator sequences (tNOS) (FIG. 5).

3. gRNA Design and Expression
3.1 gRNAs for Mediating V89A Modification: Structure and its Expression

[0189] For targeted V89A modification, crRNAs of at least 17 nucleotides (nt) long are designed against the maize ZmPYL-E genomic target sequence (5′-CGCGA CGTCA ACGTC AAGAC-3′) (SEQ ID NO:362) preceding the 5′-CGG-3′ PAM (protospacer adjacent motif) sequence for Cas9-mediated target recognition. For example, gRNAs of 17-nt (5′-GA CGUCA ACGUC AAGAC-3′) (SEQ ID NO:363), 18-nt (5′-CGA CGUCA ACGUC AAGAC-3′) (SEQ ID NO:364), 19-nt (5′-GCGA CGUCA ACGUC AAGAC-3′) (SEQ ID NO:365), 20-nt (5′-CGCGA CGUCA ACGUC AAGAC-3′) (SEQ ID NO:366) or 21-nt (5′-G CGCGA CGUCA ACGUC AAGAC-3′) (SEQ ID NO:367) can be used to guide Cas9 cleavage of the ZmPYL-E target. crRNA is co-delivered with tracRNA and Cas9 protein or mRNA to mediate target site cleavage. Preferably, crRNA molecule is fused with tracRNA molecule covalently into a single guide RNA (gRNA). gRNAs can be synthesized chemically or produced by in vitro transcription. In vitro produced gRNAs can be used directly for physical delivery such as biolistic bombardment with Cas9 RNA or protein to mediate target cleavage and homology-directed target modification if repair donor oligonucleotide is co-delivered. More preferably, gRNA is produced in planta from DNA expression cassette comprising RNA polymerase III (PolIII) promoter such as plant U3 and U6 promoters such as rice U3 and U6 promoters (prOsU3 and prOsU6). For prOsU3, the transcription start begins with nucleotide A, whereas for prOsU6, the transcription starts with nucleotide G (Shan et al. (2013) Nature Biotechnology 31: 686-688; Xie and Yang (2013) Molecular Plant 6:1975-1983). For example, to produce gRNA targeting the endogenous ZmPYKL-E sequence (5′-CGCGA CGTCA ACGTC AAGAC-3′) (SEQ ID NO:362), 19-nt DNA oligonucleotides (5′-GCGA CGTCA ACGTC AAGAC-3′) (SEQ ID NO:365) or 21-nt oligonucleotides (5′-G CGCGA CGTCA ACGTC AAGAC-3′) (SEQ ID NO:367) is fused to the DNA sequences encoding tracRNA scaffold ((5′-GTTTT AGAGC TAGAA ATAGC AAGTT AAAAT AAGGC TAGTC CGTTA TCAAC TTGAA AAAGT GGCAC CGAGT CGGTG C-3′) (SEQ ID NO: 370) and PolIII termination sequences (5′-GTTTT AGAGC TAGAA ATAGC AAGTT AAAAT AAGGC TAGTC CGTTA TCAAC TTGAA AAAGT GGCAC CGAGT CGGTG CTTTT TTTTT-3′(SEQ ID NO:413), Mali et al. (2013) Science 339:823-826) and placed under the control of rice polymerase III promoter U3 (prOsU3) or U6 (prOsU6). Below is the sequence (SEQ ID NO:371) of the expression cassette comprising of prOsU3 and coding sequences for the gRNA comprising the 19-nt V89A crRNA (underlined) fused with tracRNA. This sequence is cloned into biolistic transformation vector along with the Cas9 expression cassette to form vector pZmPYLE-V89A (FIG. 5).

(SEQ ID NO: 371)
5′-GGGAT CTTTA AACAT ACGAA CAGAT CACTT AAAGT
TCTTC TGAAG CAACT TAAAG TTATC AGGCA TGCAT GGATC
TTGGA GGAAT CAGAT GTGCA GTCAG GGACC ATAGC ACAGG
ACAGG CGTCT TCTAC TGGTG CTACC AGCAA ATGCT GGAAG
CCGGG AACAC TGGGT ACGTT GGAAA CCACG TGATG TGGAG
TAAGA TAAAC TGTAG GAGAA AAGCA TTTCG TAGTG GGCCA
TGAAG CCTTT CAGGA CATGT ATTGC AGTAT GGGCC GGCCC
ATTAC GCAAT TGGAC GACAA CAAAG ACTAG TATTA GTACC
ACCTC GGCTA TCCAC ATAGA TCAAA GCTGG TTTAA AAGAG
TTGTG CAGAT GATCC GTGGC AGCGA CGTCA ACGTC AAGAC
GTTTT AGAGC TAGAA ATAGC AAGTT AAAAT AAGGC TAGTC
CGTTA TCAAC TTGAA AAAGT GGCAC CGAGT CGGTG CTTTT
TTTTT-3′

[0190] The sequence example below (SEQ ID NO:372) describes the expression cassette comprising of prOsU6 promoter and coding sequences for a gRNA comprising the 21-nt V89A crRNA (underlined) and tracRNA.

(SEQ ID NO: 372)
5′-TTTGT GAAAG TTGAA TTACG GCATA GCCGA AGGAA
TAACA GAATC GTTTC ACACT TTCGT AACAA AGGTC TTCTT
ATCAT GTTTC AGACG ATGGA GGCAA GGCTG ATCAA AGTGA
TCAAG CACAT AAACG CATTT TTTTA CCATG TTTCA CTCCA
TAAGC GTCTG AGATT ATCAC AAGTC ACGTC TAGTA GTTTG
ATGGT ACACT AGTGA CAATC AGTTC GTGCA GACAG AGCTC
ATACT TGACT ACTTG AGCGA TTACA GGCGA AAGTG TGAAA
CGCAT GTGAT GTGGG CTGGG AGGAG GAGAA TATAT ACTAA
TGGGC CGTAT CCTGA TTTGG GCTGC GTCGG AAGGT GCAGC
CCACG CGCGC CGTAC CGCGC GGGTG GCGCT GCTAC CCACT
TTAGT CCGTT GGATG GGGAT CCGAT GGTTT GCGCG GTGGC
GTTGC GGGGG ATGTT TAGTA CCACA TCGGA AACCG AAAGA
CGATG GAACC AGCTT ATAAA CCCGC GCGCT GTAGT CAGCT
TGCGC GACGT CAACG TCAAG ACGTT TTAGA GCTAG AAATA
GCAAG TTAAA ATAAG GCTAG TCCGT TATCA ACTTG AAAAA
GTGGC ACCGA GTCGG TGCTTTT TTTTT-3′

3.2 gRNA for Mediating E149L Modification: Structure and its Expression

[0191] For targeted E149L modification of the maize ZmPYL-E, the two underlined bases in the maize genomic target sequence (5′-GCACC CTGGT GATCG AGTCG TTCGT GGTCG-3′) (SEQ ID NO:368) needs to be converted into CT to form mutant sequence (5′-GCACC CTGGT GATCC TGTCG TTCGT GGTCG-3′ (SEQ ID NO:412)). In order to achieve that, an expression cassette for a sequence coding for the 20-nt guide RNA (5′-CCTGG TGATC CTGTC GTTCG-3′, xZmPYLE-E149L) (SEQ ID NO:369), tracRNA scaffold and PolIII termination sequences (5′-GTTTT AGAGC TAGAA ATAGC AAGTT AAAAT AAGGC TAGTC CGTTA TCAAC TTGAA AAAGT GGCAC CGAGT CGGTG CTTTT TTTTT-3′ (SEQ ID NO:413), Mali et al. (2013) Science 339:823-826) was placed under the control of rice polymerase III promoter U6 (prOsU6) as shown in FIG. 6. prOsU6 promoter initiates transcription after nucleotide G. In FIG. 6, the prOsU6-E149L gRNA expression cassette has the following sequences (SEQ ID NO:373) with the 20 bp targeting guide sequence (xZmPYLE-E149L or xZmPYLe, SEQ ID NO: 369) underlined.

(SEQ ID NO: 373)
5′-TTTGT GAAAG TTGAA TTACG GCATA GCCGA AGGAA
TAACA GAATC GTTTC ACACT TTCGT AACAA AGGTC TTCTT
ATCAT GTTTC AGACG ATGGA GGCAA GGCTG ATCAA AGTGA
TCAAG CACAT AAACG CATTT TTTTA CCATG TTTCA CTCCA
TAAGC GTCTG AGATT ATCAC AAGTC ACGTC TAGTA GTTTG
ATGGT ACACT AGTGA CAATC AGTTC GTGCA GACAG AGCTC
ATACT TGACT ACTTG AGCGA TTACA GGCGA AAGTG TGAAA
CGCAT GTGAT GTGGG CTGGG AGGAG GAGAA TATAT ACTAA
TGGGC CGTAT CCTGA TTTGG GCTGC GTCGG AAGGT GCAGC
CCACG CGCGC CGTAC CGCGC GGGTG GCGCT GCTAC CCACT
TTAGT CCGTT GGATG GGGAT CCGAT GGTTT GCGCG GTGGC
GTTGC GGGGG ATGTT TAGTA CCACA TCGGA AACCG AAAGA
CGATG GAACC AGCTT ATAAA CCCGC GCGCT GTAGT CAGCT
TGCCT GGTGA TCGAG TCGTT CGGTT TTAGA GCTAG AAATA
GCAAG TTAAA ATAAG GCTAG TCCGT TATCA ACTTG AAAAA
GTGGC ACCGA GTCGG TGCTT TTTTT TT-3′

[0192] Alternatively, the guide RNA can also be expressed from a different polymerase III promoter like rice U3 promoter (prOsU3) which initiates transcription after nucleotide A. The prOsU3-E149L gRNA expression cassette has the following sequences (SEQ ID NO:374) with the 20 bp targeting guide sequence (xZmPYLE-E149L or xZmPYLe, SEQ ID NO: 369) underlined. This prOsU3-E149L gRNA expression cassette along with PMI selectable marker gene cassette and prSoUbi4 driven Cas9 gene expression cassette are inserted into binary vector backbone to form transformation vector 23190 (FIG. 8).

(SEQ ID NO: 374)
5′-GGGAT CTTTA AACAT ACGAA CAGAT CACTT AAAGT
TCTTC TGAAG CAACT TAAAG TTATC AGGCA TGCAT GGATC
TTGGA GGAAT CAGAT GTGCA GTCAG GGACC ATAGC ACAGG
ACAGG CGTCT TCTAC TGGTG CTACC AGCAA ATGCT GGAAG
CCGGG AACAC TGGGT ACGTT GGAAA CCACG TGATG TGGAG
TAAGA TAAAC TGTAG GAGAA AAGCA TTTCG TAGTG GGCCA
TGAAG CCTTT CAGGA CATGT ATTGC AGTAT GGGCC GGCCC
ATTAC GCAAT TGGAC GACAA CAAAG ACTAG TATTA GTACC
ACCTC GGCTA TCCAC ATAGA TCAAA GCTGG TTTAA AAGAG
TTGTG CAGAT GATCC GTGGC ACCTG GTGAT CGAGT CGTTC
GGTTT TAGAG CTAGA AATAG CAAGT TAAAA TAAGG CTAGT
CCGTT ATCAA CTTGA AAAAG TGGCA CCGAG TCGGT GCTTT
TTTTT T-3′

4. Generation of Mutants with Targeted Genomic Sequence Modification in ZmPYL-E Gene
4.1 Generation of Targeted Mutation V89A in ZmPYL-E Gene with Biolistic Bombardment

[0193] For target gene sequence modification mediated by homology-directed repair, donor DNA molecule needs to be co-delivered with Cas9 and gRNA. DNA molecule with at least 15 nucleotides flanking the Cas9 cleavage site and containing the intended mutant nucleotide(s) is used as repair donor. For modification of the target sequence 5′-CGCGA CGTCA ACGTC AA/GAC-3′ to result in V89A mutation, the single underlined residue T needs to be converted to C so valine at position 89 (V89, GTC) is changed to alanine (A89, GCC). Since the intended Cas9 cleavage site (indicated by /) is 9 nucleotides downstream, preferably, the repair DNA molecule should contain sequences at least 15-nt upstream of TCA and 15-nt downstream of the underlined A in AA/GAC as in this sequence (5′-GCAGCCT GCGCGACGCC AACGTCAA/GA CCGGCCTGCC GGC-3′) (SEQ ID NO:375). More preferably, the repair DNA molecule should contain sequences with at least 20-nt upstream of TCA and at least 20-nt downstream of the underlined A in AA/GAC as outlined in this sequence (5′-GG TCGGCAGCCT GCGCGACGCC AACGTCAA/GA CCGGCCTGCC GGCGACGA-3′) (SEQ ID NO:376). More preferably, the repair DNA molecule should contain sequences with more than 30-nt upstream of TCA and more than 30-nt downstream of the underlined A in AA/GAC as outlined in this sequence (5′-AC CAGCTC GAGG TCGGCAGCCT GCGCGACGCC AACGTCAA/GA CCGGCCTGCC GGCGACGACC AGAACCGA-3′) (SEQ ID NO:377). Most preferably, the repair DNA molecule should contain sequences with more than 50-nt upstream of TCA and more than 50-nt downstream of the underlined A in AA/GAC as indicated in this sequence (5′-GA ACTGCGTCGT GCGCGGGGAC CAGCTC GAGG TCGGCAGCCT GCGCGACGCC AACGTCAA/GA CCGGCCTGCC GGCGACGACC AGAACCGAGC GCCTCGAGCA GCTCGACGA-3′) (SEQ ID NO:378). It should be noted that oligonucletoides with sequences corresponding to the opposite strand of SEQ ID NO:375 to SEQ ID NO:378 can also be used for mediating targeted V89A mutation.

[0194] To generate plants carrying V89A mutation, the above described repair donor DNA oligonucleotide (5′-AC CAGCTC GAGG TCGGCAGCCT GCGCGACGCC AACGTCAA/GA CCGGCCTGCC GGCGACGACC AGAACCGA-3′) (SEQ ID NO:377) that comprise sequences 30-nt upstream of TCA and 30-nt downstream of the underlined A in AA/GAC is co-precipitated with pZmPYLE-V89A vector (FIG. 1) onto gold particles and bombarded into immature maize embryos (genotype A188, HiII or other applicable varieties). Methods for maize immature embryo bombardment, callus induction tissue regeneration and rooting methods have been described previously except here no mannose selection is required (Wright et al., 2001, Efficient biolistic transformation of maize (Zea mays L.) and wheat (Triticum aestivum L.) using the phosphomannose isomerase gene, pmi, as the selectable marker. Plant Cell Reports 20:429-436.). Briefly, immature embryos are isolated from harvested immature ears at about 9-12 days after pollination and pre-cultured for 3 to 5 days on osmoticum media. Pre-cultured embryos are then bombarded with DNA vector ZmPYLE-V89A and the donor oligonucleotide using BioRad PDS-1000 Biolistic particle delivery system. Bombarded embryos are then incubated in callus induction media and then moved onto regeneration media to induce shoot formation. Shoots are then moved to rooting media. Preferably but not essential, a selectable marker gene cassette like PMI is also added to the ZmPYLE-V89A vector so only transformed cells containing an integrated gRNA or Cas9 expression cassette will be selected for regeneration. Samples are then harvested from regenerated plants for genotyping to identify plants containing the desired V89A mutation in the ZmPYL-E gene. Genotyping can be done with one or more of the standard mutation detection methods such as PCR amplification followed by sequencing, capillary electrophoresis and Nuclease Surveyer assay.

[0195] ZmPYLE-V89A vector carries the gRNA and Cas9 expression cassettes can also be delivered into maize cells using other physical delivery method such as protoplast transformation and silicon carbide whisker-mediated transformation. The repair donor DNA molecule can also be delivered into cells in the form of single- or double-stranded molecule that is present as part of a recombinant DNA molecule such as restriction fragment or plasmid or T-DNA or viral replicon for generation of transformed cells using methodologies known in the art. Alternatively, gRNA and Cas9 expression vectors and repair donor vector can be transformed into maize cells with Agrobacterium-mediated transformation. It should be noted that for targeted modification, no integration of Cas9 or gRNA expression vector is required or even preferred. Therefore, these vectors can be delivered transiently by biolistic transformation or Agrobacterium-mediated transformation.

4.2 Generation of Targeted Mutation E149L in ZmPYL-E Gene with Biolistic and Agrobacterium-Mediated Transformation

[0196] Similar to the above example (Section 4.1) for generating ZmPYLE-V89A mutation, targeted E149L mutation (Table 1) can be introduced into ZmPYL-E gene using biolistic bombardment using DNA vectors carrying Cas9 and gRNA expression cassettes such as these shown in FIG. 6 and FIG. 8 along with repair donor DNA sequences containing the desired mutation such as in the form of purified oligonucleotide with this sequence (ZmPYL-Eb, SEQ ID NO:379, 5′-TGACG GGAGG CCGGG CACCC TGGTG ATCCT GTCGT TCGTA GTCGA TGTGC CTGAT GGCAA-3′, Table 2). Other forms of repair donor oligonucleotides can be used too. For example, the oligonucleotides can be longer or in the complimentary strand or contain chemical modifications (e.g. phosphorothioate or methylphosphonate) to enhance stability or affinity to the target sequences. Chemically modified oligonucletoides have been described (Deleavey and Damha, 2012, Chemistry & Biology, http://dx.doi.org/10.1016/j.chembiol.2012.07.011). To demonstrate utility of such chemically modified oligonucleotides, experiments were done using oligonucleotides with sequences from the non-coding strand and also containing phosphorothioate linkage (Table 2, ZmPYL-Ec-NT-PM, SEQ ID NO:380, 5′-T*T*C*GT GTTGC CATCA GGCAC ATCGA CTACG AACGA CAGGA TCACC AGGGT GCCCG GCCTC CCGTC AATG*C* T*C-3′, * denotes the presence of phosphorothioate linkage between nucleotides).

[0197] Targeted mutation E149L in ZmPYL-E gene can also be generated with DNA molecules delivered via Agrobacterium. Agrobacterium-mediated transformation methods have been described elsewhere (Ishida et al. (1996). High efficiency transformation of maize (Zea mays L.) mediated by Agrobacterium tumefaciens. Nat. Biotechnol. 14, 745-750; Negrotto et al. (2000). Theuse of phosphomannose-isomerase as a selectable marker to recover transgenic maize plants (Zea mays L.) via Agrobacterium transformation. Plant Cell Rep. 19, 798-803.). Briefly, the prOsU6-E149L (SEQ ID NO:373) or prOsU3-E148L (SEQ ID NO:374) gRNA expression cassette is cloned into a binary vector carrying PMI selectable marker cassette and also an expression cassette for Cas9 with maize preferred codons forming transformation vector pZmPYLE-E149L and 23190 (FIG. 6, FIG. 8, Table 1). These vectors can be used to deliver Cas9 and gRNA expression cassettes into maize cells with Agrobacterium-mediated transformation. The repair donor DNA molecule containing the intended mutant sequences (5′-TGACG GGAGG CCGGG CACCC TGGTG ATCCT GTCGT TCGTA GTCGA TGTGC CTGAT GGCAA-3′) (SEQ ID NO:379) is co-delivered into cells from a separate T-DNA molecule. However, it can be also be inserted into the T-DNA region next to the gRNA and Cas9 expression cassettes in the binary vector pZmPYLE-E149L or 23190 (FIG. 2). The donor repair template can also be delivered in the form of viral replicon derived from another T-DNA (Baltes et al. 2014, DNA replicons for plant genome engineering. Plant Cell. 26:151-163). PMI marker is used to select for transgenic plants with integrated Cas9 or gRNA expression cassette. However, it should be noted that stable transformation of transformation vectors is not essential or even preferred for generating desired mutations as long as enough plants are screened since transient expression of Cas9 and gRNA is sufficient to result in cleavage of the chromosomal target sequence to induce DNA repair. However, it should be noted that for targeted modification, no integration of Cas9 or gRNA expression vector is required or even preferred.

### 4.3 Generation of Multiple Amino Acid Modifications in ZmPYL-E Gene Simultaneously

[0198] It should be noted that more than one target can be modified at the same time if gRNAs and repair donors for multiple target sequences are present at the same time. For example, both V89A and E149L mutations can be obtained by co-bombarding vector pZmPYLE-V89A-E149L containing expression cassettes for Cas9 and two gRNAs (FIG. 7) along with both repair donor DNA templates, V89A oligonucleotide (5′-AC CAGCTC GAGG TCGGCAGCCT GCGCGACGCC AACGTCAA/GA CCGGCCTGCC GGCGACGACC AGAACCGA-3′)(SEQ ID NO:377) and E149L oligonucleotides ODN-ZmPYL-Eb (5′-TGACG GGAGG CCGGG CACCC TGGTG ATCCT GTCGT TCGTA GTCGA TGTGC CTGAT GGCAA-3′) (SEQ ID NO:379) or ODN-ZmPYL-Ec-NT-PM (SEQ ID NO:380, 5′-T*T*C*GT GTTGC CATCA GGCAC ATCGA CTACG AACGA CAGGA TCACC AGGGT GCCCG GCCTC CCGTC AATG*C* T*C-3′, * denotes the presence of phosphorothioate linkage between nucleotides).

[0199] As described for generating plants with single mutations, bombarded embryos are then incubated in callus induction media and then moved onto regeneration media to induce shoot formation. Shoots are then moved to rooting media. PMI marker can be used to select for transgenic plants with integrated Cas9 or gRNA expression cassette. However, it should be noted again that stable transformation of transformation vectors is not essential or even preferred for generating desired mutations as long as enough plants are screened to identify plants with desired mutations since transient expression of Cas9 and gRNA is sufficient to result in cleavage of the chromosomal target sequence to induce DNA repair. Samples are then harvested from regenerated plants for genotyping to identify plants containing the desired V89A and E149L mutations in the ZmPYL-E gene. Genotyping can be done with one or more of the standard mutation detection methods such as PCR amplification followed by sequencing, capillary electrophoresis and Nuclease Surveyer assay.

### 4.4 Generation of Additional Targeted Mutations at V89 Position in ZmPYL-E Gene

[0200] Alternate site-directed changes can be introduced at the V89 position of the ZmPYL-E to obtain ABA hypersensitive mutations by using similar method described above for creating V89A mutation except that repair donor oligonucleotide sequences need to be changed to introduce the corresponding mutations. For example, V89I and V89Y mutations can be introduced by using the same gRNAs (SEQ ID NOS: 363 to 367) to guide Cas9 cleavage of the ZmPYL-E target. Expressing cassettes for gRNA and Cas9 can be delivered into maize cells simultaneously by any physical or biological methods such as biolistic bombardment or Agrobacterium-mediated transformation. For introduction of V89I mutation, the single underlined residue Gin the ZmPYL-E genomic target sequence 5′-CGCGA CGTCA ACGTC AA/GAC-3′ needs to be converted to A, so valine at position 89 (V89, GTC) is changed to isoleucine (I89, ATC). Since the intended Cas9 cleavage site (indicated by /) is 9 nucleotides downstream, preferably, the repair DNA molecule should contain sequences at least 15-nt upstream of GTC and 15-nt downstream of the underlined A in AA/GAC as in this sequence (5′-GGCAGCCT GCGCGACATC AACGTCAAGA CCGGCCTGCC GGC-3′) (SEQ ID NO:381). More preferably, the repair DNA molecule should contain sequences with at least 20-nt upstream of ATC and at least 20-nt downstream of the underlined A in AAGAC as outlined in this sequence (5′-AGG TCGGCAGCCT GCGCGACATC AACGTCAAGA CCGGCCTGCC GGCGACGA-3′) (SEQ ID NO:382). More preferably, the repair DNA molecule should contain sequences with more than 30-nt upstream of ATC and more than 30-nt downstream of the underlined A in AAGAC as outlined in this sequence (5′-GAC CAGCTC GAGG TCGGCAGCCT GCGCGACATC AACGTCAAGA CCGGCCTGCC GGCGACGACC AGAACCGA-3′) (SEQ ID NO:383). Most preferably, the repair DNA molecule should contain sequences with more than 50-nt upstream of ATC and more than 50-nt downstream of the underlined A in AAGAC as indicated in this sequence (5′-GGA ACTGCGTCGT GCGCGGGGAC CAGCTC GAGG TCGGCAGCCT GCGCGACATC AACGTCAAGA CCGGCCTGCC GGCGACGACC AGAACCGAGC GCCTCGAGCA GCTCGACGA-3′) (SEQ ID NO:384).

[0201] For introduction of V89Y mutation, the two underlined residues GT in the maize genomic target sequence 5′-CGCGA CGTCA ACGTC AA/GAC-3′ need to be converted to TA, so the valine residue at position 89 (V89, GTC) is changed to tyrosine (Y89, TAC). Since the intended Cas9 cleavage site (indicated by /) is 9 nucleotides downstream, preferably, the repair DNA molecule should contain sequences at least 15-nt upstream of GTC and 15-nt downstream of the underlined A in AA/GAC as in this sequence (5′-GGCAGCCT GCGCGACTAC AACGTCAAGA CCGGCCTGCC GGC-3′) (SEQ ID NO:385). More preferably, the repair DNA molecule should contain sequences with at least 20-nt upstream of TAC and at least 20-nt downstream of the underlined A in AAGAC as outlined in this sequence (5′-AGG TCGGCAGCCT GCGCGACTAC AACGTCAAGA CCGGCCTGCC GGCGACGA-3′) (SEQ ID NO:386). More preferably, the repair DNA molecule should contain sequences with more than 30-nt upstream of TAC and more than 30-nt downstream of the underlined A in AAGAC as outlined in this sequence (5′-GAC CAGCTC GAGG TCGGCAGCCT GCGCGACTAC AACGTCAAGA CCGGCCTGCC GGCGACGACC AGAACCGA-3′) (SEQ ID NO:387). Most preferably, the repair DNA molecule should contain sequences with more than 50-nt upstream of TAC and more than 50-nt downstream of the underlined A in AA/GAC as indicated in this sequence (5′-GGA ACTGCGTCGT GCGCGGGGAC CAGCTC GAGG TCGGCAGCCT GCGCGACTAC AACGTCAAGA CCGGCCTGCC GGCGACGACC AGAACCGAGC GCCTCGAGCA GCTCGACGA-3′) (SEQ ID NO:388).

[0202] Similarly, double mutants containing V89I (or V89Y) and E149L (see, e.g., SEQ ID NOS:390, 391 and 392) can be obtained by transforming maize cells with vectors containing expression cassettes for Cas9 and two gRNAs along with oligonucleotides to introduce corresponding mutations (E149L, V89I or V89Y) as described above in section 4.3.

### 5. Generation of Targeted E169L Genomic Sequence Modification in Additional ZmPYL Gene Family Members, ZmPYL-D, ZmPYL-F and ZmPYL-J

[0203] 5.1 Mutagenesis Targets and gRNA Design

[0204] Similar to examples described above for endogenous ZmPYL-E gene (Example 4 and Table 1), additional ZmPYL gene family members were also chosen for targeted genome editing to replace specific nucleotides so the amino acid residue corresponding to E¹⁶⁹ in the ABA receptors (ZmPYL-D, ZmPYL-F and ZmPYL-J) is changed to a hypersenstive form L¹⁶⁹. These intended changes are summarized in Table 1. These experiments aimed to modify the corresponding conserved amino acid residue E (glutamic acid) into L (Leucine) in homologous ZmPYL genes.

TABLE 1
ZmPYL mutations and gRNA
sequences and transformation vectors

| | | Desired | | Trans- |
|---|---|---|---|---|
| | WT maize | mutant | gRNA target sequence | formation |
| ZmPYL | protein | protein | in transformation vector | vector |
| gene | sequence | sequence | (SEQ. ID. NO. and notes) | name |
| ZmPYL-E | LVIE¹⁴⁹SFV | LVIL¹⁴⁹SFV | 5′-cctgg tgatc gagtc gttcg-3′ | 23190 |
| (GRMZM2G16 | | | (SEQ. ID. NO: 369; target site | |
| 5567_P02) | | | in coding strand, base | |
| | | | replacement 5 bp away from the | |
| | | | Cas9 cleavage site) | |
| ZmPYL-D | TLVIE¹⁶⁹SFV | TLVIL¹⁶⁹SFV | 5′-gtcgg ggacg tcgac gacga-3′ | 23136 |
| (GRMZM2G04 | | | (SEQ. ID. NO: 393; target site | |
| 8733_P02) | | | in template strand, base | |
| | | | replacement 8 bp away from the | |
| | | | Cas9 cleavage site) | |
| ZmPYL-D | LVIE¹⁶⁹SFV | LVIL¹⁶⁹SFV | 5′-gaggt catcg acggc cggcc-3′ | 23189 |
| (GRMZM2G04 | | | (SEQ. ID. NO: 394; target site | |
| 8733_P02) | | | in coding strand, base | |
| | | | replacement 19 bp away from | |
| | | | the Cas9 cleavage site) | |
| ZmPYL-F | LVIE¹⁶⁴SFV | LVIL¹⁶⁴SFV | 5′-gctcg tgatc gagtc cttcg | 22981 |
| (GRMZM2G05 | | | tgg-3′ (SEQ. ID. NO: 395; | |
| 3882_P01) | | | longer targeting guide sequence | |
| | | | (23 bp), target site in coding | |
| | | | strand, base replacement 8 bp | |
| | | | away from the Cas9 cleavage site) | |
| ZmPYL-F | LVIE¹⁶⁴SFV | LVIL¹⁶⁴SFV | 5′-gctcg tgatc gagtc cttcg-3′ | 23191 |
| (GRMZM2G05 | | | (SEQ. ID. NO: 396; shorter | |
| 3882_P01) | | | targeting guide sequence (20 bp), | |
| | | | target site in coding strand, | |
| | | | base replacement 5 bp away from | |
| | | | the Cas9 cleavage site) | |
| ZmPYL-J | VVLE¹⁴⁸SYV | VVLE¹⁴⁸SYV | 5′-cgtcg acgac gtagg actcg-3′ | 23192 |
| (GRMZM2G15 | | | (SEQ. ID. NO: 397; target site | |
| 4987_P01) | | | in template strand, base | |
| | | | replacement at the Cas9 cleavage | |
| | | | site) | |

5.2 Constructions of Vectors for Expression of gRNAs Targeting ZmPYL-D, ZmPYL-F and ZmPYL-J Genes

[0205] Similar to examples described above for constructing 23190 for expressing gRNA for endogenous ZmPYL-E gene (Example 4), transformation vectors expressing Cas9 and different gRNAs (Table 1) for ZmPYL-D (23136 and 23189), ZmPYL-F (22981 and 23191) and ZmPYL-J (23192) genes were constructed (FIGS. 9A-9B, 10A-10B and 11). The gRNA targeting sequence for different ZmPYL genes are listed in Table 1 (SEQ ID NO:393 to 397). In these vectors, the whole gRNA coding regions [˜20 nucleotide targeting guides (SEQ ID NO:393 to 397), tracRNA scaffold and PolIII termination sequences (5′-GTTTT AGAGC TAGAA ATAGC AAGTT AAAAT AAGGC TAGTC CGTTA TCAAC TTGAA AAAGT GGCAC CGAGT CGGTG CTTTT TTTTT-3′)] were placed under the control of rice polymerase III U3 promoter (prOsU3). These vectors also contain a PMI selectable marker gene cassette for selecting stable transformants. These vectors can be used for transformation mediated by Agrobacterium-mediated transformation or used directly for particle bomdbarment.

### 5.3 Generation of Genome Edited Novel Alleles (Targeted Mutagenesis and Allele Replacement Mutants) Mediated CRISPR-Cas in ZmPYL-D, ZmPYL-F and ZmPYL-J Genes

[0206] Novel alleles including targeted mutagenesis and allele replacement mutants can be generated via CRISPR-Cas system in the presence of repair donor DNA by Agrobacterium-mediated transformation or particle bomdbarment as described in Example 4 for ZmPYL-E. Here specific examples are provided for targeted notations in ZmPYL-D, ZmPYL-F and ZmPYL-J genes using biolistic co-delivery of transformation vectors (Table 1 and FIG. 9A-B to 11) and repair donor oligodeoxynucleotides with desired mutations (Table 2 and Seq ID NO:398 to 410). Oligodeoxynucleotides (ODNs) of different length, strand (coding and non-coding template) or modification (with and without phosphorothioate linkage modification at the ends) (Seq ID NO:397 to 409) were used to mediate mutagenesis in different ZmPYL genes.

TABLE 2
Repair donor DNA oligonucleotide sequences

| | Cas9 and gRNA | Oligo- | | | |
|---|---|---|---|---|---|
| | expression | deoxynucleotide | Length | | |
| ZmPYL gene | vector(s) | (ODN) | (nt) | Notes | Seq. ID. No. |
| ZmPYL-D | 23136 | ODN-ZmPYL-Dc | 75 | PAM #1 and target site in template strand, | Seq. ID. No. 398 |
| | | | | base replacement 8 bp away from the Cas9 | |
| | | | | cleavage site | |
| ZmPYL-D | 23136 | ODN-ZmPYL-Dd- | 75 | PAM#1 and target site in template strand, base | Seq. ID. No. 399 |
| | | NT | | replacement 8 bp away from the Cas9 | |
| | | | | cleavage site; PAM in donor ODN removed | |
| ZmPYL-D | 23136 | ODN-ZmPYL-Dd- | 75 | PAM#1 and target site in coding strand, base | Seq. ID. No. 400 |
| | | NT-PM | | replacement 8 bp away from the Cas9 | |
| | | | | cleavage site; PAM in donor ODN removed; | |
| | | | | ODN with phosphorothioate linkage | |
| | | | | modification | |
| ZmPYL-D | 23189 | ODN-ZmPYL-Db | 88 | PAM #2 and target site in coding strand, base | Seq. ID. No. 401 |
| | | | | replacement 19 bp away from the Cas9 | |
| | | | | cleavage site; PAM in donor ODN removed; | |
| ZmPYL-E | 23190 | ODN- ZmPYL-Eb | 60 | Target site in coding strand, base replacement | Seq. ID. No. 379 |
| | | | | 5 bp away from the Cas9 cleavage site; ODN | |
| | | | | in non-coding strand; PAM in donor ODN | |
| | | | | removed | |
| ZmPYL-E | 23190 | ODN-ZmPYL-Ec- | 72 | Target site in coding strand, base replacement | Seq. ID. No. 380 |
| | | NT-PM | | 5 bp away from the Cas9 cleavage site; ODN | |
| | | | | with phosphorothioate linkage modification; | |
| | | | | PAM in donor ODN removed | |
| ZmPYL-F | 22981, 23191 | ODN-ZmPYL-Fa | 60 | Target site in coding strand, base replacement | Seq. ID. No. 402 |
| | | | | 5 or 8 bp away from the Cas9 cleavage site; | |
| | | | | PAM in donor ODN not removed | |
| ZmPYL-F | 22981, 23191 | ODN-ZmPYL-Fb | 60 | Target site in coding strand, base replacement | Seq. ID. No. 403 |
| | | | | 5 or 8 bp away from the Cas9 cleavage site; | |
| | | | | PAM in donor ODN removed | |
| ZmPYL-F | 22981, 23191 | ODN-ZmPYL-Fc | 77 | Target site in coding strand, base replacement | Seq. ID. No. 404 |
| | | | | 5 or 8 bp away from the Cas9 cleavage site; | |
| | | | | PAM in donor ODN removed | |
| ZmPYL-F | 22981, 23191 | ODN-ZmPYL-Fd- | 77 | Target site in coding strand, base replacement | Seq. ID. No. 405 |
| | | NT | | 5 or 8 bp away from the Cas9 cleavage site; | |
| | | | | PAM in donor ODN removed | |
| ZmPYL-F | 22981, 23191 | ODN-ZmPYL-Fd- | 77 | Target site in coding strand, base replacement | Seq. ID. No. 406 |
| | | NT-PM | | 5 or 8 bp away from the Cas9 cleavage site; | |
| | | | | PAM in donor ODN removed; ODN with | |
| | | | | phosphorothioate linkage modification | |
| ZmPYL-J | 23192 | ODN-ZmPYL-Jc | 68 | Target site in template strand, base | Seq. ID. No. 407 |
| | | short | | replacement at the Cas9 cleavage site; ODN in | |
| | | | | coding strand sequence | |
| ZmPYL-J | 23192 | ODN--ZmPYL-Jc- | 68 | Target site in template strand, base | Seq. ID. No. 408 |
| | | NT | | replacement at the Cas9 cleavage site; ODN in | |
| | | | | non-coding strand sequence | |
| ZmPYL-J | 23192 | ODN--ZmPYL-Jc- | 68 | Target site in template strand, base | Seq. ID. No. 409 |
| | | NT-PM | | replacement at the Cas9 cleavage site; ODN in | |
| | | | | non-coding strand sequence and with | |
| | | | | phosphorothioate linkage modification | |
| ZmPYL-J | 23192 | ODN--ZmPYL-Jc- | 88 | Target site in template strand, base | Seq. ID. No. 410 |
| | | long | | replacement at the Cas9 cleavage site; ODN in | |
| | | | | coding strand sequence | |

[0207] More specifically, the above described transformation vector (Table 2) expressing Cas9 and gRNA is mixed with its corresponding repair donor DNA oligonucleotides (SEQ ID NO:398 to 410) and then precipitated onto gold particles. The coated gold particles are then used to bombard immature maize embryos of elite inbred transformation variety NP2222 (DeFramond A J, et al (2013) Corn Event 5307. U.S. Pat. No. 8,466,346). Other maize genotype such as A188 and HiII can be used as bombardment target tissue source. Methods for maize immature embryo bombardment, callus induction tissue regeneration and rooting methods have been described previously except here no mannose selection is required (Wright et al., 2001, Efficient biolistic transformation of maize (Zea mays L.) and wheat (Triticum aestivum L.) using the phosphomannose isomerase gene, pmi, as the selectable marker. Plant Cell Reports 20:429-436). For example, for mutagenesis of ZmPYL-F gene mediated by CRISP-Cas9, immature embryos are isolated from harvested immature ears at about 9-12 days after pollination and pre-cultured for 3 to 5 days on osmoticum media. Pre-cultured embryos are then bombarded with DNA vector 22981 along with one of the oligonucleotides [ODN-ZmPYL-Fa, ODN-ZmPYL-Fb, ODN-ZmPYL-Fc, ODN-ZmPYL-Fd-NT or ODN-ZmPYL-Fd-NT-PM (Seq. ID. NO:402 to 406)] using BioRad PDS-1000 Biolistic particle delivery system. Bombarded embryos are then incubated in callus induction media and then moved onto mannose selection media. Selected calli are moved onto regeneration media to induce shoot formation. Shoots are then moved to rooting media. Samples are then harvested from regenerated plants for genotyping to identify plants containing the desired genomic sequence mutation that results in E164L amino acid change in the ZmPYL-F gene. Table 3 lists different experiments for targeted mutagenesis and allele replacement of different ZmPYL genes. In some experiments, gRNA and Cas9 expression vector was co-transformed with ZsGreen fluorescent protein vector 12672 for assessing gene delivery efficiency. In some other experiments, two or more gRNA expression vectors were co-delivered with two or more repair donor oligodexynucleotides to mutate two or ZmPYL genes simultaneously (Table 3). Table 3 shows that ZmPYL-F in a high percentage of PMI positive events (transformants) contain mutations at the intended sequences (5′-GCTCG TGATC GAGTC CTTCG/TGGTG GACGT-3′, / indicated predicted Cas9 cleavage position) targeted by gRNA-Cas9.

TABLE 3
Targeted mutagenesis and allele replacement experiments of different ZmPYL genes

| | | | | | | Number of | Number of |
|---|---|---|---|---|---|---|---|
| | | | | Total | Total | events with | putative |
| | | ODN(s) used for | | number of | number of | mutation(s) | events with |
| ZmPYL | Transformation | generating targeted | Number of | immature | PMI positive | at the target | desired allele |
| target gene | vector(s) | mutation (s) | experiments | embryos | events | site* | change |
| ZmPYL-D | 23136 | ODN-ZmPYL-Dc | 5 | 7914 | 279 | 132 | 3 |
| ZmPYL-D | 23136, | ODN-ZmPYL-Dc | 2 | 2102 | TBD | TBD | TBD |
| | 12672 | | | | | | |
| ZmPYL-D | 23189 | ODN-ZmPYL-Db | 1 | 1750 | TBD | TBD | TBD |
| ZmPYL-E | 23190 | ODN-ZmPYL-Eb | 2 | 2238 | 60** | 15 and TBD | 1 |
| | | | | | and TBD | | |
| ZmPYL-F | 22981 | ODN-ZmPYL-Fb | 6 | 5460 | 80 and TBD | 13 and TBD | TBD |
| ZmPYL-F | 22981, | ODN-ZmPYL-Fb | 5 | 7225 | 346 and | 171 and | 6 and TBD |
| | with other | | | | TBD | TBD | |
| | (22980, | | | | | | |
| | 22978, | | | | | | |
| | 22982)** | | | | | | |
| ZmPYL-F | 22981 | ODN-ZmPYL-Fc | 1 | 810 | TBD | TBD | TBD |
| ZmPYL-J | 23192 | ODN-ZmPYL-Jc short | 1 | 855 | TBD | TBD | TBD |
| ZmPYL-J | 23192 | ODN-ZmPYL-Jc long | 1 | 1605 | TBD | TBD | TBD |
| ZmPYL-E, | 23190, | ODN-ZmPYL-Eb, | 1 | 1785 | TBD | TBD | TBD |
| ZmPYL-F | 23191 | ODN-ZmPYL-Fc | | | | | |
| ZmPYL-F, | 23191 + | ODN-ZmPYL-Jd-S-NT, | 1 | 1970 | TBD | TBD | TBD |
| ZmPYL-J | 23192 | ODN-ZmPYL-Fd-NT | | | | | |
| ZmPYL-F, | 23191 + | ODN-ZmPYL-Jd-S-NT- | 1 | 1505 | TBD | TBD | TBD |
| ZmPYL-J | 23192 | PM, ODN-ZmPYL-Fd- | | | | | |
| | | NT-PM | | | | | |

[0208] Sequencing of ZmPYL-F target region in selected mutants confirmed qPCR results. FIG. 13 shows sequence alignment of targeted mutations in ZmPYL-F mediated by gRNA-Cas9 expressed from vector 22981. Note: * Event with both monoallelic and/or biallelic mutations; ** These vectors (22980, 22978 or 22982) carry cassettes for expression of control gRNAs (including NGG sequence) for testing specificity of gRNA for ZmPYL genes. # TBD, to be determined; experiments are in progress and no data is available at the moment.

### 5.4 Molecular Characterization of Edited ZmPYL Mutants

[0209] Leaf samples are harvested from regenerated plants in root vessels for molecular analysis or genotyping to identify plants containing mutations at the target sequence and also containing desired sequence mutations that results in desired amino acid change in the ZmPYL genes. Targeted mutants can be identified using one of the following methods: (1) PCR amplification of the target region followed by restriction enzyme digestion and gel electrophoresis if the mutated sequence contains a restriction site (Lloyd A et al. 2005. Proc. Natl. Acad. Sci. USA 102:2232-37; Zhang F, et al. 2010. Proc. Natl. Acad. Sci. USA 107:12028-33). This method is simple, but requires the presence of suitable restriction site, thus cannot be used for most targets. (2) PCR amplification of the target region followed by Sanger sequencing or deep sequencing (Gross, E. et al. 1999. Hum. Genet. 105, 72-78. Shukla V K, et al. 2009. Nature 459:437-41. Townsend J A, et al. 2009. Nature 459:442-45.); Sequencing approach is definitive and sensitive, but takes longer time and throughput can be limited by capacity. (3) PCR amplification of the target region followed by denaturation, annealing and capillary electrophoresis (Li-Sucholeik X C, et al. 1999. Electrophoresis 20, 1224-1232; Larsen L A, et al. 1999. Hum. Mutat. 13, 318-327) or denaturing high-performance liquid chromatography to detect base pair changes by heteroduplex analysis (McCallum C M, et al. 2000. Nature Biotechnology 18, 455-457); these methods are limited by throughput and the identified mutations need to be further verified by sequencing. (4) PCR amplification of the target region followed by denaturation, heteroduplex formation/strand annealing, digestion with mismatch-specific nuclease (such as CEL1 and T7 endonuclease) and gel electrophoresis (Oleykowski, C. A. et al. 1998. Nucleic Acids Res. 26, 4597-4602. Colbert et al. 2001. Plant Physiol. 126:480-484; Lombardo A, et al. 2007. Nat. Biotechnol. 25:1298-306), for example using the commercially available Surveyer™ nuclease assay kit (Transgenomic, Gaithersburg, Md., USA; Qiu, P., et al. 2004. BioTechniques 36, 702-707). However, the gel-based assays are not as sensitive as high-throughput DNA sequencing and can only detect mutation with frequency of 1% or more. All of the above 4 approaches of identifying a potential mutant in a target site are based on the presence of a new signal in a qualitative fashion, either a new band in a gel or a new peak in a chromatogram that is different from the wild type reference sequence.

[0210] We have developed an alternative high throughput assay method for identification of plants with any site-directed mutation at the targeted sequences based on qPCR (Syngenta Provisional Patent Application #9207-137PR, case 80484). The method measures the reduction of the wild type target site sequence in cells or tissues that have been treated with a site-directed nuclease in a quantitative fashion in comparison with a reference sample. Typically, a Taqman-based assay is used for quantification of the target sequence copy numbers. For detecting potential events with desired allele replacement, an additional high throughput end-point assay is designed and performed. In this end point assay, signals from two MGB probes are used to determine the presence of WT or expected mutant allele as shown in FIG. 12. Events with putative allele replacement are selected based on both Taqman copy number assay (WT target sequence copy number) and end point assay (mutant copy number) results. Putative events with putative allele replacement are further confirmed by DNA sequence analysis of amplified target locus sequences. Table 4 shows the qPCR and end point assay results of selected number of regerated maize plants generated from biolistic transformation experiment of vector 22981 (FIG. 10A-10B) co-delivered with oligonucleotide ODN-ZmPYL-Fb (Seq. ID.No. 402). As shown in Table 4, transformation vector-specific assays were performed to determine if there is any transgene insertion (cCas9-01 and cPMI-09 qPCR assays). qPCR assay (ZmPYL-F cutting site) was also performed to determine the copy number of the ZmPYL-F maize genomic target site sequence (5′-GCTCG TGATC GAGTC CTTCG/TGG-3′, SEQ ID NO:394). Finally, an end point assay (ZmPYL-F E164L) was also used to determine if plants have intended sequence mutation (from GAG to CTG) resulting in E164L amino acid residue change. For example, plant MZET151104A015A has a single copy of transgene insertion (for Cas9 and PMI genes), biallelic mutations at the target sequence since ZmPYL-F cutting site copy call is 0 (in WT, the copy call should be 2) and no E164L mutation. Another plant MZET151104A125A has more than 2 copies of transformation vector (22981) insertion and only one copy of the ZmPYL-F cutting site is mutated. But plant MZET151104A125A is positive for end point assay for detecting ZmPYL-F E164L mutation. This event is thus a candidate event with ZmPYL-F E164L mutation. Candidate events MZET151104A125A, MZET151104A174A and MZET151104A180A in Table 4 are then further confirmed by sequencing analysis of PCR-amplified ZmPYL-F genome sequences.

TABLE 4
qPCR and end point assay results of regenerated maize events

| | | | | Assays for genomic | | |
|---|---|---|---|---|---|---|
| | | Assays for | | target sequence | | |
| | | transgene vector | | ZmPYL-F | ZmPYL-F | |
| | | cCas9-01 | cPMI-09 | cutting site | E164L | |
| | Assay name | (qPCR) | (qPCR) | (qPCR) | (End point) | |
| | (Type) | Copy | Copy | Copy | Null/Het/ | Candidate |
| Plant ID | Construct ID | number | number | number | Hom | event |
| MZET151104A015A | 22981 | 1 | 1 | 0 | Null | |
| MZET151104A017A | 22981 | 1 | 1 | 1 | Null | |
| MZET151104A019A | 22981 | >2 | >2 | 0 or 1 | Null | |
| MZET151104A021A | 22981 | 1 | 1 | 1 | Null | |
| MZET151104A125A | 22981 | >2 | 2 | 1 | Het | Yes |
| MZET151104A126A | 22981 | >2 | >2 | 1 | Null | |
| MZET151104A132A | 22981 | 1 | 1 or 2 | 1 or 2 | Null | |
| MZET151104A138A | 22981 | 1 | 1 | 0 | Null | |
| MZET151104A141A | 22981 | 1 or 2 | 1 | 0 | Null | |
| MZET151104A158A | 22981 | >2 | 2 | 1 | Null | |
| MZET151104A174A | 22981 | >2 | >2 | 1 | Het | Yes |
| MZET151104A178A | 22981 | >2 | 1 | 1 | Null | |
| MZET151104A180A | 22981 | >2 | 1 | 1 | Het | Yes |
| MZET151104A186A | 22981 | >2 | >2 | 0 or 1 | Null | |
| MZET151104A195A | 22981 | >2 | >2 | 0 | Null | |
| MZET151104A201A | 22981 | 0 | 0 | 1 | Null | |

### 5.5 Evaluation of ZmPYL Gene Edited Mutants

[0211] ZmPYL gene edited mutants are tested as described for transgenic T6PP maize plants (Nuccio et al., 2015, Nature Biotechnology, doi:10.1038/nbt.3277) with managed stress environment (MSE) trials. Mutant lines that show improved plant response to water deficit are further tested in multiple location agronomic equivalency (Ag Eq) trials with mutant lines grown alongside control plants and using a checkerboard plot layout.

```
PYL-E V89A
(SEQ ID NO: 389)
Met Val Gly Leu Val Gly Gly Ser Thr Ala Arg Ala Glu His Val Val
  1 5 10 15
Ala Asn Ala Gly Gly Glu Ala Glu Tyr Val Arg Arg Met His Arg His
                        20 25 30
Ala Pro Thr Glu His Gln Cys Thr Ser Thr Leu Val Lys His Ile Lys
                35 40 45
Ala Pro Val His Leu Val Trp Glu Leu Val Arg Arg Phe Asp Gln Pro
        50 55 60
Gln Arg Tyr Lys Pro Phe Val Arg Asn Cys Val Val Arg Gly Asp Gln
65 70 75 80
Leu Glu Val Gly Ser Leu Arg Asp Ala Asn Val Lys Thr Gly Leu Pro
                                85 90 95
Ala Thr Thr Ser Thr Glu Arg Leu Glu Gln Leu Asp Asp Asp Leu His
                        100 105 110
Ile Leu Gly Val Lys Phe Val Gly Gly Asp His Arg Leu Gln Asn Tyr
                115 120 125
Ser Ser Ile Ile Thr Val His Pro Glu Ser Ile Asp Gly Arg Pro Gly
        130 135 140
Thr Leu Val Ile Glu Ser Phe Val Val Asp Val Pro Asp Gly Asn Thr
145 150 155 160
Lys Asp Glu Thr Cys Tyr Phe Val Glu Ala Val Ile Lys Cys Asn Leu
                                165 170 175
Asn Ser Leu Ala Glu Val Ser Glu Gln Leu Ala Val Glu Ser Pro Thr
                        180 185 190
Ser Leu Ile Asp Gln
                195
PYL-E V89A E149L
(SEQ ID NO: 390)
Met Val Gly Leu Val Gly Gly Ser Thr Ala Arg Ala Glu His Val Val
  1 5 10 15
Ala Asn Ala Gly Gly Glu Ala Glu Tyr Val Arg Arg Met His Arg His
                        20 25 30
Ala Pro Thr Glu His Gln Cys Thr Ser Thr Leu Val Lys His Ile Lys
                35 40 45
Ala Pro Val His Leu Val Trp Glu Leu Val Arg Arg Phe Asp Gln Pro
        50 55 60
Gln Arg Tyr Lys Pro Phe Val Arg Asn Cys Val Val Arg Gly Asp Gln
65 70 75 80
Leu Glu Val Gly Ser Leu Arg Asp Ala Asn Val Lys Thr Gly Leu Pro
                                85 90 95
Ala Thr Thr Ser Thr Glu Arg Leu Glu Gln Leu Asp Asp Asp Leu His
                        100 105 110
Ile Leu Gly Val Lys Phe Val Gly Gly Asp His Arg Leu Gln Asn Tyr
                115 120 125
Ser Ser Ile Ile Thr Val His Pro Glu Ser Ile Asp Gly Arg Pro Gly
        130 135 140
Thr Leu Val Ile Leu Ser Phe Val Val Asp Val Pro Asp Gly Asn Thr
145 150 155 160
Lys Asp Glu Thr Cys Tyr Phe Val Glu Ala Val Ile Lys Cys Asn Leu
                                165 170 175
Asn Ser Leu Ala Glu Val Ser Glu Gln Leu Ala Val Glu Ser Pro Thr
                        180 185 190
Ser Leu Ile Asp Gln
                195
PYL-E V89I E149L
(SEQ ID NO: 391)
Met Val Gly Leu Val Gly Gly Ser Thr Ala Arg Ala Glu His Val Val
  1 5 10 15
Ala Asn Ala Gly Gly Glu Ala Glu Tyr Val Arg Arg Met His Arg His
                        20 25 30
Ala Pro Thr Glu His Gln Cys Thr Ser Thr Leu Val Lys His Ile Lys
                35 40 45
Ala Pro Val His Leu Val Trp Glu Leu Val Arg Arg Phe Asp Gln Pro
        50 55 60
Gln Arg Tyr Lys Pro Phe Val Arg Asn Cys Val Val Arg Gly Asp Gln
65 70 75 80
Leu Glu Val Gly Ser Leu Arg Asp Ile Asn Val Lys Thr Gly Leu Pro
                                85 90 95
Ala Thr Thr Ser Thr Glu Arg Leu Glu Gln Leu Asp Asp Asp Leu His
                        100 105 110
Ile Leu Gly Val Lys Phe Val Gly Gly Asp His Arg Leu Gln Asn Tyr
                115 120 125
Ser Ser Ile Ile Thr Val His Pro Glu Ser Ile Asp Gly Arg Pro Gly
        130 135 140
Thr Leu Val Ile Leu Ser Phe Val Val Asp Val Pro Asp Gly Asn Thr
145 150 155 160
Lys Asp Glu Thr Cys Tyr Phe Val Glu Ala Val Ile Lys Cys Asn Leu
                                165 170 175
Asn Ser Leu Ala Glu Val Ser Glu Gln Leu Ala Val Glu Ser Pro Thr
                        180 185 190
Ser Leu Ile Asp Gln
                195
PYL-E V89Y E149L
(SEQ ID NO: 392)
Met Val Gly Leu Val Gly Gly Ser Thr Ala Arg Ala Glu His Val Val
  1 5 10 15
Ala Asn Ala Gly Gly Glu Ala Glu Tyr Val Arg Arg Met His Arg His
                        20 25 30
Ala Pro Thr Glu His Gln Cys Thr Ser Thr Leu Val Lys His Ile Lys
                35 40 45
Ala Pro Val His Leu Val Trp Glu Leu Val Arg Arg Phe Asp Gln Pro
        50 55 60
Gln Arg Tyr Lys Pro Phe Val Arg Asn Cys Val Val Arg Gly Asp Gln
65 70 75 80
Leu Glu Val Gly Ser Leu Arg Asp Tyr Asn Val Lys Thr Gly Leu Pro
                                85 90 95
Ala Thr Thr Ser Thr Glu Arg Leu Glu Gln Leu Asp Asp Asp Leu His
                        100 105 110
Ile Leu Gly Val Lys Phe Val Gly Gly Asp His Arg Leu Gln Asn Tyr
                115 120 125
Ser Ser Ile Ile Thr Val His Pro Glu Ser Ile Asp Gly Arg Pro Gly
        130 135 140
Thr Leu Val Ile Leu Ser Phe Val Val Asp Val Pro Asp Gly Asn Thr
145 150 155 160
Lys Asp Glu Thr Cys Tyr Phe Val Glu Ala Val Ile Lys Cys Asn Leu
                                165 170 175
Asn Ser Leu Ala Glu Val Ser Glu Gln Leu Ala Val Glu Ser Pro Thr
                        180 185 190
Ser Leu Ile Asp Gln
                195
ODN-ZmPYL-Dc
(SEQ ID NO: 398)
AGGTC ATCGA CGGCC GGCCA GGGAC GCTCG TCATC CTGTC ATTCG TCGTC
GACGT CCCCG ACGGC AACAC CAAGG
ODN-ZmPYL-Dd-NT
(SEQ ID NO: 399)
CCTTG GTGTT GCCGT CGGGG ACGTC GACGA CGAAT GACAG GATGA CGAGC
GTCCC TGGCC GGCCG TCGAT GACCT
ODN-ZmPYL-Dd-NT-PM
(SEQ ID NO: 400)
C*C*T*T GGTGT TGCCG TCGGG GACGT CGACG ACGAA TGACA GGATG ACGAG
CGTCC CTGGC CGGCC GTCGA TGA*C*C *T
*denotes phosphorothioate modification
ODN-ZmPYL-Db
(SEQ ID NO: 401)
CCATC CTCAC CGTCC ACCCG GAGGT CATCG ACGGC CGACC AGGGA CGCTC
GTCAT CCTGT CCTTC GTCGT CGACG TCCCC GACGG CAA
ODN-ZmPYL-Fa
(SEQ ID NO: 402)
CGACG GCCGA CCGGG GACGC TCGTG ATCCT GTCCT TCGTG GTGGA CGTCC
CCGAC GGCAA
ODN-ZmPYL-Fb
(SEQ ID NO: 403)
CGACG GCCGA CCGGG GACGC TCGTG ATCCT GTCCT TCGTA GTGGA CGTCC
CCGAC GGCAA
ODN-ZmPYL-Fc
(SEQ ID NO: 404)
AGGTC ATCGA CGGCC GACCG GGGAC GCTCG TGATC CTGTC CTTCG TAGTG
GACGT CCCCG ACGGC AACAC CAAGG AC
ODN-ZmPYL-Fd-NT
(SEQ ID NO: 405)
GTCCT TGGTG TTGCC GTCGG GGACG TCCAC TACGA AGGAC AGGAT CACGA
GCGTC CCCGG TCGGC CGTCG ATGAC CT
ODN-ZmPYL-Fd-NT-PM
(SEQ ID NO: 406)
G*T*C*CT TGGTG TTGCC GTCGG GGACG TCCAC TACGA AGGAC AGGAT CACGA
GCGTC CCCGG TCGGC CGTCG ATGA*C* C*T
*denotes phosphorothioate modification
ODN-ZmPYL-Jc short
(SEQ ID NO: 407)
CACCG AGTTC CAGCC GGGCC CCTAC TGCGT CGTGC TCCTG TCCTA CGTCG
TCGAC GTCCC CGACG GCA
ODN-ZmPYL-Jc short-NT
(SEQ ID NO: 408)
TGCCG TCGGG GACGT CGACG ACGTA GGACA GGAGC ACGAC GCAGT AGGGG
CCCGG CTGGA ACTCG GTG
ODN-ZmPYL-Jc short-NT-PM
(SEQ ID NO: 409)
T*G*C*CG TCGGG GACGT CGACG ACGTA GGACA GGAGC ACGAC GCAGT AGGGG
CCCGG CTGGA ACTCG *G*T*G
*denotes phosphorothioate modification
ODN-ZmPYL-Jc long
(SEQ ID NO: 410)
TCACC TCCGT CACCG AGTTC CAGCC GGGCC CCTAC TGCGT CGTGC TCCTG
TCCTA CGTCG TCGAC GTCCC CGACG GCAAC ACCGA GGA
```

[0212] It is understood that the examples and embodiments described herein are for illustrative purposes only and that various modifications or changes in light thereof will be suggested to persons skilled in the art and are to be included within the spirit and purview of this application and scope of the appended claims. All publications, patents, and patent applications cited herein are hereby incorporated by reference in their entirety for all purposes.

What is claimed is:

1. An isolated nucleic acid comprising a polynucleotide encoding a mutated PYR/PYL receptor polypeptide comprising an amino acid substitution corresponding to the amino acid F61, V81, I110, E141, and A160 in PYR1 as set forth in SEQ ID NO:1, wherein the mutated PYR/PYL receptor has increased sensitivity to abscisic acid compared to a control PYR/PYL receptor lacking the substitution.

2. The isolated nucleic acid of claim 1, wherein the PYR/PYL receptor polypeptide comprises an amino acid substitution corresponding to the amino acid F61.

3. The isolated nucleic acid of claim 2, wherein the amino acid substitution is selected from L and M.

4. The isolated nucleic acid of claim 1, wherein the PYR/PYL receptor polypeptide comprises an amino acid substitution corresponding to the amino acid V81.

5. The isolated nucleic acid of claim 4, wherein the amino acid substitution is selected from I and Y.

6. The isolated nucleic acid of claim 1, wherein the PYR/PYL receptor polypeptide comprises an amino acid substitution corresponding to the amino acid I110.

7. The isolated nucleic acid of claim 6, wherein the amino acid substitution is selected from C and S.

8. The isolated nucleic acid of claim 1, wherein the PYR/PYL receptor polypeptide comprises an amino acid substitution corresponding to the amino acid E141.

9. The isolated nucleic acid of claim 8, wherein the amino acid substitution is selected from C, I, L, M, N, T, V, W, and Y.

10. The isolated nucleic acid of claim 1, wherein the PYR/PYL receptor polypeptide comprises an amino acid substitution corresponding to the amino acid A160.

11. The isolated nucleic acid of claim 8, wherein the amino acid substitution is selected from C, I, and V.

12. The isolated nucleic acid of claim 1, wherein the mutated PYR/PYL receptor polypeptide is substantially identical to any of SEQ ID NOs:1-119 or SEQ ID NOs:155-361 or comprises any of SEQ ID NOs: 120-123.

13. The isolated nucleic acid of claim 1, wherein the polynucleotide encodes a fusion protein, the fusion protein comprising the mutated PYR/PYL receptor polypeptide and a fusion partner protein.

14. The isolated nucleic acid of claim 13, wherein the fusion partner protein is a transcriptional activation or modulation domain.

15. The isolated nucleic acid of claim 14, wherein the transcriptional activator is VP16 or VP64.

16. The isolated nucleic acid of claim 13, wherein the fusion protein further comprises a nuclear localization signal sequence.

17. A cell comprising a heterologous polynucleotide of claim 1.

18. The cell of claim 17, wherein the cell is a non-plant eukaryotic cell.

19. A plant comprising the polynucleotide of claim 1.

20. A plant comprising an in situ mutated PYR/PYL receptor polypeptide comprising an amino acid substitution corresponding to the amino acid F61, V81, I110, E141, and A160 in PYR1 as set forth in SEQ ID NO:1, wherein the mutated PYR/PYL receptor polypeptide has increased sensitivity to abscisic acid compared to a control PYR/PYL receptor lacking the substitution.

21. An expression cassette comprising a promoter operably linked to the polynucleotide of claim 1, wherein introduction of the expression cassette into a plant results in the plant having increased sensitivity to abscisic acid compared to a control plant lacking the expression cassette.

22. The expression cassette of claim 21, wherein the promoter is heterologous to the polynucleotide.

23. The expression cassette of claim 21, wherein the promoter is inducible.

24. The expression cassette of claim 21, wherein the promoter is a stress-inducible promoter.

25. An expression vector comprising the expression cassette of claim 21.

26. A plant comprising the expression cassette of claim 21, wherein the plant has increased sensitivity to abscisic acid compared to a control plant lacking the expression cassette.

27. A plant cell from the plant of claim 19.

28. A seed, flower, leaf, fruit, processed food, or food ingredient from the plant of claim 19.

29. A method of producing a plant having increased sensitivity to abscisic acid, the method comprising:
introducing the expression cassette of claim 21 into a plurality of plants; and
selecting a plant that expresses the polynucleotide from the plurality of plants.

30. A method of producing a plant having increased sensitivity to abscisic acid, the method comprising:
introducing a mutation into a polynucleotide encoding a PYR/PYL polypeptide, wherein the mutation results in the polynucleotide of claim 1.

31. The method of claim 30, wherein the introducing occurs in situ in the genome of a plant cell.

32. The method of claim 31, wherein the introducing comprises clustered regularly interspaced short palindromic repeats (CRISPR)/Cas genome editing.

33. A guide ribonucleic acid (gRNA) comprising:
a) a CRISPR ribonucleic acid (crRNA) that is substantially identical to SEQ ID NOS: 363, 364, 365, 366, 367 or 369; and
b) a transacting ribonucleic acid (tracRNA),
wherein the PYR/PYL mutation target site comprises a nucleic acid that encodes for V89 of PYL-E or E149 of PYL-E.

The application's sequence listing, which the Patent Office published only in electronic form, follows.

SEQUENCE LISTING (430 sequences)

SEQ ID NO: 1 - protein, 191 aa, Arabidopsis thaliana
MPSELTPEERSELKNSIAEFHTYQLDPGSCSSLHAQRIHAPPELVWSIVRRFDKPQTYKHFIKSCSVEQNFEMRVGCTRDVIVISGLPANTSTERLDILDDERRVTGFSIIGGEHRLTNYKSVTTVHRFEKENRIWTVVLESYVVDMPEGNSEDDTRMFADTVVKLNLQKLATVAEAMARNSGDGSGSQVT

SEQ ID NO: 2 - protein, 221 aa, Arabidopsis thaliana
MANSESSSSPVNEEENSQRISTLHHQTMPSDLTQDEFTQLSQSIAEFHTYQLGNGRCSSLLAQRIHAPPETVWSVVRRFDRPQIYKHFIKSCNVSEDFEMRVGCTRDVNVISGLPANTSRERLDLLDDDRRVTGFSITGGEHRLRNYKSVTTVHRFEKEEEEERIWTVVLESYVVDVPEGNSEEDTRLFADTVIRLNLQKLASITEAMNRNNNNNNSSQVR

SEQ ID NO: 3 - protein, 190 aa, Arabidopsis thaliana
MSSSPAVKGLTDEEQKTLEPVIKTYHQFEPDPTTCTSLITQRIHAPASVVWPLIRRFDNPERYKHFVKRCRLISGDGDVGSVREVTVISGLPASTSTERLEFVDDDHRVLSFRVVGGEHRLKNYKSVTSVNEFLNQDSGKVYTVVLESYTVDIPEGNTEEDTKMFVDTVVKLNLQKLGVAATSAPMHDDE

SEQ ID NO: 4 - protein, 209 aa, Arabidopsis thaliana
MNLAPIHDPSSSSTTTTSSSTPYGLTKDEFSTLDSIIRTHHTFPRSPNTCTSLIAHRVDAPAHAIWRFVRDFANPNKYKHFIKSCTIRVNGNGIKEIKVGTIREVSVVSGLPASTSVEILEVLDEEKRILSFRVLGGEHRLNNYRSVTSVNEFVVLEKDKKKRVYSVVLESYIVDIPQGNTEEDTRMFVDTVVKSNLQNLAVISTASPT

SEQ ID NO: 5 - protein, 207 aa, Arabidopsis thaliana
MLAVHRPSSAVSDGDSVQIPMMIASFQKRFPSLSRDSTAARFHTHEVGPNQCCSAVIQEISAPISTVWSVVRRFDNPQAYKHFLKSCSVIGGDGDNVGSLRQVHVVSGLPAASSTERLDILDDERHVISFSVVGGDHRLSNYRSVTTLHPSPISGTVVVESYVVDVPPGNTKEETCDFVDVIVRCNLQSLAKIAENTAAESKKKMSL

SEQ ID NO: 6 - protein, 203 aa, Arabidopsis thaliana
MRSPVQLQHGSDATNGFHTLQPHDQTDGPIKRVCLTRGMHVPEHVAMHHTHDVGPDQCCSSVVQMIHAPPESVWALVRRFDNPKVYKNFIRQCRIVQGDGLHVGDLREVMVVSGLPAVSSTERLEILDEERHVISFSVVGGDHRLKNYRSVTTLHASDDEGTVVVESYIVDVPPGNTEEETLSFVDTIVRCNLQSLARSTNRQ

SEQ ID NO: 7 - protein, 215 aa, Arabidopsis thaliana
MPTSIQFQRSSTAAEAANATVRNYPHHHQKQVQKVSLTRGMADVPEHVELSHTHVVGPSQCFSVVVQDVEAPVSTVWSILSRFEHPQAYKHFVKSCHVVIGDGREVGSVREVRVVSGLPAAFSLERLEIMDDDRHVISFSVVGGDHRLMNYKSVTTVHESEEDSDGKKRTRVVESYVVDVPAGNDKEETCSFADTIVRCNLQSLAKLAENTSKFS

SEQ ID NO: 8 - protein, 211 aa, Arabidopsis thaliana
MEMIGGDDTDTEMYGALVTAQSLRLRHLHHCRENQCTSVLVKYIQAPVHLVWSLVRRFDQPQKYKPFISRCTVNGDPEIGCLREVNVKSGLPATTSTERLEQLDDEEHILGINIIGGDHRLKNYSSILTVHPEMIDGRSGTMVMESFVVDVPQGNTKDDTCYFVESLIKCNLKSLACVSERLAAQDITNSIATFCNASNGYREKNHTETNL

SEQ ID NO: 9 - protein, 188 aa, Arabidopsis thaliana
MEANGIENLTNPNQEREFIRRHHKHELVDNQCSSTLVKHINAPVHIVWSLVRRFDQPQKYKPFISRCVVKGNMEIGTVREVDVKSGLPATRSTERLELLDDNEHILSIRIVGGDHRLKNYSSIISLHPETIEGRIGTLVIESFVVDVPEGNTKDETCYFVEALIKCNLKSLADISERLAVQDTTESRV

SEQ ID NO: 10 - protein, 187 aa, Arabidopsis thaliana
MMDGVEGGTAMYGGLETVQYVRTHHQHLCRENQCTSALVKHIKAPLHLVWSLVRRFDQPQKYKPFVSRCTVIGDPEIGSLREVNVKSGLPATTSTERLELLDDEEHILGIKIIGGDHRLKNYSSILTVHPEIIEGRAGTMVIESFVVDVPQGNTKDETCYFVEALIRCNLKSLADVSERLASQDITQ

SEQ ID NO: 11 - protein, 183 aa, Arabidopsis thaliana
MNGDETKKVESEYIKKHHRHELVESQCSSTLVKHIKAPLHLVWSIVRRFDEPQKYKPFISRCVVQGKKLEVGSVREVDLKSGLPATKSTEVLEILDDNEHILGIRIVGGDHRLKNYSSTISLHSETIDGKTGTLAIESFVVDVPEGNTKEETCFFVEALIQCNLNSLADVTERLQAESMEKKI

SEQ ID NO: 12 - protein, 161 aa, Arabidopsis thaliana
METSQKYHTCGSTLVQTIDAPLSLVWSILRRFDNPQAYKQFVKTCNLSSGDGGEGSVREVTVVSGLPAEFSRERLDELDDESHVMMISIIGGDHRLVNYRSKTMAFVAADTEEKTVVVESYVVDVPEGNSEEETTSFADTIVGFNLKSLAKLSERVAHLKL

SEQ ID NO: 13 - protein, 159 aa, Arabidopsis thaliana
MKTSQEQHVCGSTVVQTINAPLPLVWSILRRFDNPKTFKHFVKTCKLRSGDGGEGSVREVTVVSDLPASFSLERLDELDDESHVMVISIIGGDHRLVNYQSKTTVFVAAEEEKTVVVESYVVDVPEGNTEEETTLFADTIVGCNLRSLAKLSEKMMELT

SEQ ID NO: 14 - protein, 164 aa, Arabidopsis thaliana
MESSKQKRCRSSVVETIEAPLPLVWSILRSFDKPQAYQRFVKSCTMRSGGGGGKGGEGKGSVRDVTLVSGFPADFSTERLEELDDESHVMVVSIIGGNHRLVNYKSKTKVVASPEDMAKKTVVVESYVVDVPEGTSEEDTIFFVDNIIRYNLTSLAKLTKKMMK

SEQ ID NO: 15 - protein, 191 aa, Brassica oleracea
MPSQLTPEERSELAQSIAEFHTYHLGPGSCSSLHAQRIHAPPEIVWSVVRRFDKPQTYKHFIKSCSVEDGFEMRVGCTRAVNVISGLPANTSTERLDILDDERRVTGFSIIGGEHRLTNYKSVTTVHRFEKERRIWTVVLESYVVDMPEGNSEDDTRMFADTVVKLNLQKLATVTEAMARNAGDGSGAQVT

SEQ ID NO: 16 - protein, 281 aa, Brassica oleracea
MPSELTQEERSKLTQSISEFHTYHLGPGSCSSLHAQRIHAPPEIVWSVVRQFDKPQTYKHFIKSCSVEEGFEMRVGCTRDVIVISGLPANTSTERLDMLDDERRVTGFSIIGGEHRLKNYKSVTTVHRFERERRIWTVVLESYVVDMPEGNSEDDTRMFADTVVKLNLQKLATVTEAMARNAGDGRGSRETTCRESFHLITAFEKQRQITEPTVYQNPPYHTGMTPEPRTSTVFIELEDHRTLPGNLTPTTEEHLQRMYQRFWGIRQLQRPRQSFGERQSI

SEQ ID NO: 17 - protein, 453 aa, Vitis vinifera
MQMKYLEGKQNLMEEKGEKQCIPMDLAVREAQFKGSLLDRITWLEQRLHKLSLQLETRSKQQPHPSRMQTAGETSSRHGPKKELSCSFPVFSTRNHNHGHKQTSQFHVPRFEYQEGGRENPAVVITKLTPFHHPKIITILFPISNYFIIFFFLTFDTKKQYPLLFPILPSRFLPISHLITQEIEKYKTSSHFSSPASLFAAMNKAETSSMAEAESEDSETTTPTTHHLTIPPGLTQPEFQELAHSISEFHTYQVGPGQCSSLLAQRVHAPLPTVWSVVRRFDKPQTYKHFIKSCHVEDGFEMRVGCLRDVNVISGLPAETSTERLDILDDERHVTGFSIIGGEHRLRNYRSVTTNHGGEIWTVVLESYVVDMPEGNTEEDTRLFADTVVKLNLQKLASVTEVSQSCNYPCQFHIIENEDIQPEEMNLGVLTTSIEEQRKKKRVVAMKDGSTSS

SEQ ID NO: 18 - protein, 195 aa, Vitis vinifera
  VARIANT (193)..(193): Xaa = any amino acid
MAEAESEDSETTTPTTHHLTIPPGLTQPEFQELAHSISEFHTYQVGPGQCSSLLAQRVHAPLPTVWSVVRRFDKPQTYKHFIKSCHVEDGFEMRVGCLRDVNVISGLPAETSTERLDILDDERHVTGFSIIGGEHRLRNYRSVTTVHEYQNHGGEIWTVVLESYVVDMPEGNTEEDTRLFADTVVKLNLSEAXRR

SEQ ID NO: 19 - protein, 217 aa, Medicago truncatula
  MISC_FEATURE (1)..(217)
MEKAESSTASTSDQDSDENHRTQHHLTLPSGLRQHEFDSLIPFINSHHTYLIGPNQCSTLLAQRIHAPPQTVWSVVRSFDKPQIYKHIIKSCSLKEGFQMKVGCTRDVNVISGLPAATSTERLDVLDDERRVTGFSIIGGEHRLKNYRSVTSVHGFGDGDNGGEIWTVVLESYVVDVPEGNTEEDTRLFADTVVKLNLQKLASVTEGKNRDGDGKSH

SEQ ID NO: 20 - protein, 212 aa, Oryza sativa
MEQQEEVPPPPAGLGLTAEEYAQVRATVEAHHRYAVGPGQCSSLLAQRIHAPPAAVWAVVRRFDCPQVYKHFIRSCVLRPDPHHDDNGNDLRPGRLREVSVISGLPASTSTERLDLLDDAHRVFGFTITGGEHRLRNYRSVTTVSQLDEICTLVLESYIVDVPDGNTEDDTRLFADTVIRLNLQKLKSVSEANANAAAAAAAPPPPPPAAAE

SEQ ID NO: 21 - protein, 212 aa, Zea mays
MDQQGAGGDAEVPAGLGLTAAEYEQLRSTVDAHHRYAVGEGQCSSLLAQRIHAPPEAVWAVVRRFDCPQVYKHFIRSCALRPDPEAGDALCPGRLREVSVISGLPASTSTERLDLLDDAARVFGFSITGGEHRLRNYRSVTTVSELAVPAICTVVLESYVVDVPDGNTEDDTRLFADTVIRLNLQKLKSVAEANAAEAAATTNSVLLPRPAE

SEQ ID NO: 22 - protein, 212 aa, Zea mays
  VARIANT (11)..(11): Xaa = any amino acid
MDQQGAGGDAXVPAGLGLTAAEYEQLRSTVDAHHRYAVGEGQCSSLLAQRIHAPPEAVWAVVRRFDCPQVYKHFIRSCALRPDPEAGDALCPGRLREVSVISGLPASTSTERLDLLDDAARVFGFSITGGEHRLRNYRSVTTVSELADPAICTVVLESYVVDVPDGNTEDDTRLFADTVIRLNLQKLKSVTEANAAEAAATTNSVLLPRPAE

SEQ ID NO: 23 - protein, 233 aa, Vitis vinifera
MDPHHHHGLTEEEFRALEPIIQNYHTFEPSPNTCTSLITQKIDAPAQVVWPFVRSFENPQKYKHFIKDCTMRGDGGVGSIREVTVVSGLPASTSTERLEILDDEKHILSFRVVGGEHRLNNYRSVTSVNDFSKEGKDYTIVLESYIVDIPEGNTGEDTKMFVDTVVKLNLQKLAVVAITSLHENEEIADNEGPSREISLQSETESAERGDERRDGDGPSKACNRNEWHCTTKE

SEQ ID NO: 24 - protein, 207 aa, Oryza sativa
MEPHMERALREAVASEAERRELEGVVRAHHTFPAAERAAGPGRRPTCTSLVAQRVDAPLAAVWPIVRGFANPQRYKHFIKSCELAAGDGATVGSVREVAVVSGLPASTSTERLEILDDDRHVLSFRVVGGDHRLRNYRSVTSVTEFSSPSSPPRPYCVVVESYVVDVPEGNTEEDTRMFTDTVVKLNLQKLAAVATSSSPPAAGNHH

SEQ ID NO: 25 - protein, 210 aa, Oryza sativa
MEPHMERALREAVASEAERRELEGVVRAHHTFPAAERAAGPGRRPTCTSLVAQRVDAPLAAVWPIVRGFANPQRYKHFIKSCELAAGDGATVGSVREVAVVSGLPASTSTERLEILDDDRHVLSFRVVGGDHRLRNYRSVTSVTEFSSPSSPPSPPRPYCVVVESYVVDVPEGNTEEDTRMFTDTVVKLNLQKLAAVATSSSPPAAGNHH

SEQ ID NO: 26 - protein, 200 aa, Zea mays
MPYTAPRPSPQQHSRVLSGGGAKAASHGASCAAVPAEVARHHEHAARAGQCCSAVVQAIAAPVGAVWSVVRRFDRPQAYKHFIRSCRLVGGGDVAVGSVREVRVVSGLPATSSRERLEILDDERRVLSFRVVGGEHRLANYRSVTTVHEAGAGAGTGTVVVESYVVDVPHGNTADETRVFVDTIVRCNLQSLARTAERLA

SEQ ID NO: 27 - protein, 215 aa, Vitis vinifera
MPSNPPKSSLVVHRINSPNSITTATTASAAANNHNTSTMPPHKQVPDAVSRHHTHVVGPNQCCSAVVQQIAAPVSTVWSVVRRFDNPQAYKHFVKSCHVVVGDGDVGTLREVHVISGLPAANSTERLEILDDERHVLSFSVIGGDHRLSNYRSVTTLHPSPSSTGTVVLESYVVDIPPGNTKEDTCVFVDTIVRCNLQSLAQIAENAAGCKRSSS

SEQ ID NO: 28 - protein, 213 aa, Nicotiana tabacum
MPPSSPDSSVLLQRISSNTTPDFACKQSQQLQRRTMPIPCTTQVPDSVVRFHTHPVGPNQCCSAVIQRISAPVSTVWSVVRRFDNPQAYKHFVKSCHVIVGDGDVGTLREVRVISGLPAASSTERLEILDDERHVISFSVVGGDHRLANYRSVTTLHPEPSGDGTTIVVESYVVDVPPGNTRDETCVFVDTIVKCNLTSLSQIAVNVNRRKDS

SEQ ID NO: 29 - protein, 208 aa, Oryza sativa
MPYAAVRPSPPPQLSRPIGSGAGGGKACPAVPCEVARYHEHAVGAGQCCSTVVQAIAAPADAVWSVVRRFDRPQAYKKFIKSCRLVDGDGGEVGSVREVRVVSGLPATSSRERLEVLDDDRRVLSFRIVGGEHRLANYRSVTTVHEAAAPAMAVVVESYVVDVPPGNTWEETRVFVDTIVRCNLQSLARTVERLAPEAPRANGSIDHA

SEQ ID NO: 30 - protein, 208 aa, Oryza sativa
MPYAAVRPSPPPQLSRPIGSGAGGGKACPAVPCEVARYHEHAVGAGQCFSTVVQAIAAPADAVWSVVRRFDRPQAYKKFIKSCRLVDGDGGEVGSVREVRVVSGLPATSSRERLEVLDDDRRVLSFRIVGGEHRLANYRSVTTVHEAAAPAMAVVVESYVVDVPPGNTWEETRVFVDTIVRCNLQSLARTVERLAPEAPRANGSIDHA

SEQ ID NO: 31 - protein, 213 aa, Picea sitchensis
MDIIAGFDQLSFRLSGASKQITKTGAVQYLKGEEGYGEWLKEVMGRYHYHSHDGARECRCSSVVVQQVEAPVSVVWSLVRRFDQPQVYKHFVSNCFMRGDLKVGCLREVRVVSGLPAATSTERLDILDEERHILSFSIVGGDHRLNNYRSITTLHETLINGKPGTIVIESYVLDVPHGNTKEETCLFVDTIVKCNLQSLAHVSNHLNSTHRCL

SEQ ID NO: 32 - protein, 207 aa, Oryza sativa
MEAHVERALREGLTEEERAALEPAVMAHHTFPPSTTTATTAAATCTSLVTQRVAAPVRAVWPIVRSFGNPQRYKHFVRTCALAAGDGASVGSVREVTVVSGLPASTSTERLEMLDDDRHIISFRVVGGQHRLRNYRSVTSVTEFQPPAAGPGPAPPYCVVVESYVVDVPDGNTAEDTRMFTDTVVKLNLQMLAAVAEDSSSASRRRD

SEQ ID NO: 33 - protein, 216 aa, Oryza sativa
MPYTAPRPSPPQHSRIGGCGGGGVLKAAGAAGHAASCVAVPAEVARHHEHAAGVGQCCSAVVQAIAAPVDAVWSVVRRFDRPQAYKHFIRSCRLLDGDGDGGAVAVGSVREVRVVSGLPATSSRERLEILDDERRVLSFRVVGGEHRLSNYRSVTTVHETAAGAAAAVVVESYVVDVPHGNTADETRMFVDTIVRCNLQSLARTAEQLALAAPRAA

SEQ ID NO: 34 - protein, 212 aa, Vitis vinifera
MPSSLQLHRINNIDPTTVAVAATAAVNCHKQSRTPLRCATPVPDAVASYHAHAVGPHQCCSMVVQTTAAALPTVWSVVRRFDNPQAYKHFLKSCHVIFGDGDIGTLREVHVVSGLPAESSTERLEILDDERHVLSFSVVGGDHRLCNYRSVTTLHPSPTGTGTVVVESYVVDIPPGNTKEDTCVFVDTIVKCNLQSLAQMSEKLTNNNRNSS

SEQ ID NO: 35 - protein, 218 aa, Zea mays
MPCLQASSPGSMPYQHHGRGVGCAAEAGAAVGASAGTGTRCGAHDGEVPAEAARHHEHAAPGPGRCCSAVVQRVAAPAEAVWSVVRRFDQPQAYKRFVRSCALLAGDGGVGTLREVRVVSGLPAASSRERLEVLDDESHVLSFRVVGGEHRLQNYLSVTTVHPSPAAPDAATVVVESYVVDVPPGNTPEDTRVFVDTIVKCNLQSLATTAEKLALAAV

SEQ ID NO: 36 - protein, 179 aa, Physcomitrella patens
MQTKGRQADFQTLLEGQQDLICRFHRHELQPHQCGSILLQLIKAPVETVWSVARSFDKPQVYKRFIQTCEIIEGDGGVGSIREVRLVSSIPATSSIERLEILDDEEHIISFRVLGGGHRLQNYWSVTSLHSHEIDGQMGTLVLESYVVDIPEGNTREETHMFVDTVVRCNLKALAQVSE

SEQ ID NO: 37 - protein, 229 aa, Oryza sativa
MPCIPASSPGIPHQHQHQHHRALAGVGMAVGCAAEAAVAAAGVAGTRCGAHDGEVPMEVARHHEHAEPGSGRCCSAVVQHVAAPAPAVWSVVRRFDQPQAYKRFVRSCALLAGDGGVGTLREVRVVSGLPAASSRERLEILDDESHVLSFRVVGGEHRLKNYLSVTTVHPSPSAPTAATVVVESYVVDVPPGNTPEDTRVFVDTIVKCNLQSLAKTAEKLAAGARAAGS

SEQ ID NO: 38 - protein, 229 aa, Oryza sativa
MPCIPASSPGIPHQHQHQHHRALAGVGMAVGCAAEAAVAAAGVAGTRCGAHDGEVPMEVARHHEHAEPGSGRCCSAVVQHVAAPAAAVWSVVRRFDQPQAYKRFVRSCALLAGDGGVGTLREVRVVSGLPAASSRERLEILDDESHVLSFRVVGGEHRLKNYLSVTTVHPSPSAPTAATVVVESYVVDVPPGNTPEDTRVFVDTIVKCNLQSLAKTAEKLAAGARAAGS

SEQ ID NO: 39 - protein, 205 aa, Medicago truncatula
MPSPVQFQRFDSNTAITNGVNCPKQIQACRYALSSLKPTVSVPETVVDHHMHVVGQNQCYSVVIQTINASVSTVWSVVRRFDYPQGYKHFVKSCNVVASGDGIRVGALREVRLVSGLPAVSSTERLDILDEERHVISFSVVGGVHRCRNYRSVTTLHGDGNGGTVVIESYVVDVPQGNTKEETCSFADTIVRCNLQSLVQIAEKL

SEQ ID NO: 40 - protein, 212 aa, Zea mays
MPFAASRTSQQQHSRVATNGRAVAVCAGHAGVPDEVARHHEHAVAAGQCCAAMVQSIAAPVDAVWSLVRRFDQPQRYKRFIRSCHLVDGDGAEVGSVRELLLVSGLPAESSRERLEIRDDERRVISFRVLGGDHRLANYRSVTTVHEAAPSQDGRPLTMVVESYVVDVPPGNTVEETRIFVDTIVRCNLQSLEGTVIRQLEIAAMPHDDNQN

SEQ ID NO: 41 - protein, 233 aa, Zea mays
MRERNSSIDQEHQRGSSSRSTMPFAASRTSQQQHSRVATNGRAVAVCAGHAGVPDEVARHHEHAVAAGQCCAAMVQSIAAPVDAVWSLVRRFDQPQRYKRFIRSCHLVDGDGAEVGSVRELLLVSGLPAESSRERLEIRDDERRVISFRVLGGDHRLANYRSVTTVHEAAPSQDGRPLTMVVESYVVDVPPGNTVEETRIFVDTIVRCNLQSLEGTVIRQLEIAAMPHDDNQN

SEQ ID NO: 42 - protein, 194 aa, Physcomitrella patens
MMQEKQGRPDFQFLLEGQQDLICRFHKHELLPHQCGSILLQQIKAPVQTVWLIVRRFDEPQVYKRFIQRCDIVEGDGVVGSIREVQLVSSIPATSSIERLEILDDEEHIISFRVLGGGHRLQNYWSVTSLHRHEIQGQMGTLVLESYVVDIPDGNTREETHTFVDTVVRCNLKALAQVSEQKHLLNSNEKPAAP

SEQ ID NO: 43 - protein, 191 aa, Vitis vinifera
MKVYSPSQILAERGPRAQAMGNLYHTHHLLPNQCSSLVVQTTDAPLPQVWSMVRRFDRPQSYKRFVRGCTLRRGKGGVGSVREVNIVSGLPAEISLERLDKLDDDLHVMRFTVIGGDHRLANYHSTLTLHEDEEDGVRKTVVMESYVVDVPGGNSAGETCYFANTIIGFNLKALAAVTETMALKANIPSGF

SEQ ID NO: 44 - protein, 217 aa, Physcomitrella patens
MQQVKGRQDFQRLLEAQQDLICRYHTHELKAHQCGSILLQQIKVPLPIVWAIVRSFDKPQVYKRFIQTCKITEGDGGVGSIREVHLVSSVPATCSIERLEILDDEKHIISFRVLGGGHRLQNYSSVSSLHELEVEGHPCTLVLESYMVDIPDGNTREETHMFVDTVVRCNLKSLAQISEQQYNKDCLQQKQHDQQQMYQQRHPPLPPIPITDKNMER

SEQ ID NO: 45 - protein, 195 aa, Physcomitrella patens
MRFDIGHNDVRGFFTCEEEHAYALHSQTVELNQCGSILMQQIHAPIEVVWSIVRSFGSPQIYKKFIQACILTVGDGGVGSIREVFLVSGVPATSSIERLEILDDEKHVFSFRVLKGGHRLQNYRSVTTLHEQEVNGRQTTTVLESYVVDVPDGNTREETHMFADTVVMCNLKSLAQVAEWRAMQGITQQLSTSSL

SEQ ID NO: 46 - protein, 172 aa, Vitis vinifera
MGNLYHTHHLLPNQCSSLVVQTTDAPLPQVWSMVRRFDRPQSYKRFVRGCTLRRGKGGVGSVREVNIVSGLPAEISLERLDKLDDDLHVMRFTVIGGDHRLANYHSTLTLHEDEEDGVRKTVVMESYVVDVPGGNSAGETCYFANTIIGFNLKALAAVTETMALKANIPSGF

SEQ ID NO: 47 - protein, 196 aa, Picea sitchensis
MEDLSSWREGRAMWLGNPPSESELVCRHHRHELQGNQCSSFLVKHIRAPVHLVWSIVRTFDQPQKYKPFVHSCSVRGGITVGSIRNVNVKSGLPATASEERLEILDDNEHVFSIKILGGDHRLQNYSSIITVHPEIIDGRPGTLVIESYVVDVPEGNTREETRFFVEALVKCNLKSLADVSERLASQHHTELLERT

SEQ ID NO: 48 - protein, 185 aa, Solanum tuberosum
MNANGFCGVEKEYIRKHHLHEPKENQCSSFLVKHIRAPVHLVWSLVRRFDQPQKYKPFISRCIVQGDLEIGSLREVDVKSGLPATTSTERLELLDDEEHILSVRIVGGDHRLRNYSSVISVHPEVIDGRPGTVVLESFVVDVPEGNTKDETCYFVEALINCNLKSLADISERVAVQDRTEPIDQV

SEQ ID NO: 49 - protein, 190 aa, Medicago truncatula
MNNGCEQQQYSVIETQYIRRHHKHDLRDNQCSSALVKHIKAPVHLVWSLVRRFDQPQKYKPFISRCIMQGDLSIGSVREVNVKSGLPATTSTERLEQLDDEEHILGIRIVGGDHRLRNYSSIITVHPGVIDGRPGTMVIESFVVDVPEGNTKDETCYFVEALIRYNLSSLADVSERMAVQGRTDPININP

SEQ ID NO: 50 - protein, 185 aa, Vitis vinifera
MSGYGCIKMEDEYIRRHHRHEIRDNQCSSSLVKHIKAPVHLVWSLVRSFDQPQKYKPFVSRCIVQGDLEIGSVREVNVKSGLPATTSTERLELLDDEEHIFGMRIVGGDHRLKNYSSIVTVHPEIIDGRPGTLVIESFVVDVPDGNTKDETCYFVEALIKCNLKSLADVSERLAIQDRTEPIDRM

SEQ ID NO: 51 - protein, 185 aa, Vitis vinifera
MNGNGLSSMESEYIRRHHRHEPAENQCSSALVKHIKAPVPLVWSLVRRFDQPQKYKPFISRCVVQGNLEIGSLREVDVKSGLPATTSTERLELLDDDEHILSMRIIGGDHRLRNYSSIISLHPEIIDGRPGTMVIESYVVDVPEGNTKDETCYFVEALIKCNLKSLADVSERLAVQDRTEPIDRM

SEQ ID NO: 52 - protein, 208 aa, Oryza sativa
MEAHVERALREGLTEEERAALEPAVMAHHTFPPSTTTATTAAATCTSLVTQRVAAPVRAVWPIVRSFGNPQRYKHFVRTCALAAGNGPSFGSVREVTVVSGPSRLPPGTERLEMLDDDRHIISFRVVGGQHRLRNYRSVTSVTEFQPPAAGPGPAPPYCVVVESYVVDVPDGNTAEDTRMFTDTVVKLNLQMLAAVAEDSSSASRRRD

SEQ ID NO: 53 - protein, 186 aa, Capsicum annuum
MMNANGFSGVEKEYIRKHHLHQPKENQCSSFLVKHIRAPVHLVWSLVRRFDQPQKYKPFVSRCIAQGDLEIGSLREVDVKSGLPATTSTERLELLDDEEHILSFRIIGGDHRLRNYSSIISLHPEVIDGRPGTLVIESFVVDVPQGNTKDETCYFVEALINCNLKSLADVSERLAVQDRTEPIDQV

SEQ ID NO: 54 - protein, 186 aa, Populus trichocarpa
MNGSDAYSATEAQYVRRHHKHEPRENQCTSALVKHIKAPAHLVWSLVRRFDQPQRYKPFVSRCVMNGELGIGSVREVNVKSGLPATTSTERLELLDDEEHILGVQIVGGDHRLKNYSSIMTVHPEFIDGRPGTLVIESFIVDVPDGNTKDETCYFVEALIRCNLKSLADVSERMAVQDRVEPVNQF

SEQ ID NO: 55 - protein, 185 aa, Capsicum annuum
MNANGFSGVEKEYIRKHHLHQPKENQCSSFLVKHIRAPVHLVWSLVRRFDQPQKYKPFVSRCIAQGDLEIGSLREVDVKSGLPATTSTERLELLDDEEHILSFRIIGGDHRLRNYSSIISLHPEVIDGRPGTLVIESFVVDVPQGNTKDETCYFVEALINCNLKSLADVSERLAVQDRTEPIDQV

SEQ ID NO: 56 - protein, 186 aa, Populus trichocarpa x Populus deltoides
MNGSDAYSATEAQYVRRHHKHEPRENQCTSALVKHIKAPAHLVWSLVRRFDQPQRYKPFVSRCVMNGELGIGSVREVNVKSGLPATTSTERLELLDDEEHILGVQIVGGDHRLKNYSSIMTVHPEFIDGRPGTLVIESFIVDVPDGNTKDETCYFVKALIRCNLKSLADVSERMAVQDRVEPVNQF

SEQ ID NO: 57 - protein, 188 aa, Pisum sativum
MNNGGEQYSAIETQYIRRRHKHDLRDNQCSSALVKHIKAPVHLVWSLVRRFDQPQKYKPFVSRCIMQGDLGIGSVREVNVKSGLPATTSTERLEQLDDEEHILGIRIVGGDHRLRNYSSVITVHPEVIDGRPGTMVIESFVVDVPEGNTRDETCYFVEALIRGNLSSLADVSERMAVQGRTDPINVNP

SEQ ID NO: 58 - protein, 177 aa, Vitis vinifera
MEAQVICRHHAHEPRENQCSSVLVRHVKAPANLVWSLVRRFDQPQKYKPFVSRCVVQGDLRIGSVREVNVKTGLPATTSTERLELFDDDEHVLGIKILDGDHRLRNYSSVITVHPEIIDGRPGTLVIESFVVDVPEGNTKDDTCYFVRALINCNLKCLAEVSERMAMLGRVEPANAV

SEQ ID NO: 59 - protein, 178 aa, Vitis vinifera
MMEAQVICRHHAHEPRENQCSSVLVRHVKAPANLVWSLVRRFDQPQKYKPFVSRCVVQGDLRIGSVREVNVKTGLPATTSTERLELFDDDEHVLGIKILDGDHRLRNYSSVITVHPEIIDGRPGTLVIESFVVDVPEGNTKDDTCYFVRALINCNLKCLAEVSERMAMLGRVEPANAV

SEQ ID NO: 60 - protein, 193 aa, Arachis hypogaea
  VARIANT (162)..(162): Xaa = any amino acid
MMNGSCGGGGGGEAYGAIEAQYIRRHHRHEPRDNQCTSALVKHIRAPVHLVWSLVRRFDQPQKYKPFVSRCIMQGDLGIGSVREVNVKSGLPATTSTERLEQLDDEEHILGIRIVGGDHRLRNYSSIITVHPEVIEGRPGTMVIESFVVDVPDGNTKDETCXFVEALIRCNLSSLADVSERMAVQGRTDPINQ

SEQ ID NO: 61 - protein, 217 aa, Zea mays
MVVEMDGGVGVAAGGGGGAQTPAPAPPRRWRLADERCDLRAMETDYVRRFHRHEPRDHQCSSAVAKHIKAPVHLVWSLVRRFDQPQLFKPFVSRCEMKGNIEIGSVREVNVKSGLPATRSTERLELLDDDERILSVRFVGGDHRLQNYSSILTVHPEVIDGRPGTLVIESFVVDVPDGNTKDETCYFVEALLKCNLRSLAEVSEGQVIMDQTEPLDR

SEQ ID NO: 62 - protein, 217 aa, Zea mays
MVVEMDGGVGVAAAGGGGAQTPAPPPPRRWRLADERCDLRAMETDYVRRFHRHEPRDHQCSSAVAKHIKAPVHLVWSLVRRFDQPQLFKPFVSRCEMKGNIEIGSVREVNVKSGLPATRSTERLELLDDDERILSVRFVGGDHRLQNYSSILTVHPEVIDGRPGTLVIESFVVDVPDGNTKDETCYFVEALLKCNLRSLAEVSEGQVIMDQTEPLDR

SEQ ID NO: 63 - protein, 206 aa, Oryza sativa
MNGVGGAGGAAAGKLPMVSHRRVQWRLADERCELREEEMEYIRRFHRHEPSSNQCTSFAAKHIKAPLHTVWSLVRRFDQPQLFKPFVRNCVMRENIIATGCIREVNVQSGLPATRSTERLELLDDNEHILKVNFIGGDHMLKNYSSILTVHSEVIDGQLGTLVVESFIVDVPEGNTKDDISYFIENVLRCNLRTLADVSEERLANP

SEQ ID NO: 64 - protein, 206 aa, Oryza sativa
MNGAGGAGGAAAGKLPMVSHRQVQWRLADERCELREEEMEYIRQFHRHEPSSNQCTSFVAKHIKAPLQTVWSLVRRFDQPQLFKPFVRKCVMRENIIATGCVREVNVQSGLPATRSTERLELLDDNEHILKVKFIGGDHMLKNYSSILTIHSEVIDGQLGTLVVESFVVDIPEGNTKDDICYFIENILRCNLMTLADVSEERLANP

SEQ ID NO: 65 - protein, 205 aa, Oryza sativa
MVEVGGGAAEAAAGRRWRLADERCDLRAAETEYVRRFHRHEPRDHQCSSAVAKHIKAPVHLVWSLVRRFDQPQLFKPFVSRCEMKGNIEIGSVREVNVKSGLPATRSTERLELLDDNEHILSVRFVGGDHRLKNYSSILTVHPEVIDGRPGTLVIESFVVDVPEGNTKDETCYFVEALLKCNLKSLAEVSERLVCQGPNRAPSTR

SEQ ID NO: 66 - protein, 204 aa, Oryza sativa
MVEVGGGAAEAAAGRRWRLADERCDLRAAETEYVRRFHRHEPRDHQCSSAVAKHIKAPVHLVWSLVRRFDQPQLFKPFVSRCEMKGNIEIGSVREVNVKSGLPATRSTERLELLDDNEHILSVRFVGGDHRLKNYSSILTVHPEVIDGRPGTLVIESFVVDVPEGNTKDETCYFVEALLKCNLKSLAEVSERLVVKDQTEPLDR

SEQ ID NO: 67 - protein, 199 aa, Medicago truncatula
MEKMNGTENNGVFNSTEMEYIRRHHNQQPGENQCSSALVKHIRAPVPLVWSLVRRFDQPQKYKPFVSRCVVRGNLEIGSLREVDVKSGLPATTSTERLEVLDDNEHILSIRIIGGDHRLRNYSSIMSLHPEIIDGRPGTLVIESFVVDVPEGNTKDETCYFVEALIKCNLKSLSDVSEGHAVQDLTEPLDRVHELLISG

SEQ ID NO: 68 - protein, 199 aa, Medicago truncatula
MEKMNGTENNGVFNSTEMEYIRRHHNQQPGENQCSSALVKHIRAPVPLVWSLVRRFDQPQKYKPFVSRCVVRGNLEIGSLREVDVKSGLPATTSTERLEVLDDNEHILSIRIIGGDHRLRNYSSIMSLHPEIIDGRPGTLVIESFVVDVPEGNTKDETCYFVEALIKCNLKSLSDVSEGHAAQDLTEPLDRMHELLISG

SEQ ID NO: 69 - protein, 197 aa, Zea mays
MVGLVGGSTARAEHVVANAGGEAEYVRRMHRHAPTEHQCTSTLVKHIKAPVHLVWQLVRRFDQPQRYKPFVRNCVVRGDQLEVGSLRDVNVKTGLPATTSTERLEQLDDDLHILGVKFVGGDHRLQNYSSIITVHPESIDGRPGTLVIESFVVDVPDGNTKDETCYFVEAVIKCNLNSLAEVSEQLAVESPTSLIDQ

SEQ ID NO: 70 - protein, 197 aa, Zea mays
MVGLVGGSTARAEHVVANAGGEAEYVRRMHRHAPTEHQCTSTLVKHIKAPVHLVWELVRRFDQPQRYKPFVRNCVVRGDQLEVGSLRDVNVKTGLPATTSTERLEQLDDDLHILGVKFVGGDHRLQNYSSIITVHPESIDGRPGTLVIESFVVDVPDGNTKDETCYFVEAVIKCNLNSLAEVSEQLAVESPTSLIDQ

SEQ ID NO: 71 - protein, 212 aa, Zea mays
MVMVEMDGGVGGGGGGGQTPAPRRWRLADERCDLRAMETDYVRRFHRHEPREHQCSSAVAKHIKAPVHLVWSLVRRFDQPQLFKPFVSRCEMKGNIEIGSVREVNVKSGLPATRSTERLELLDDNEHILSVRFVGGDHRLQNYSSILTVHPEVIDGRPGTLVIESFVVDVPDGNTKDETCYFVEALLKCNLKSLAEVSERQVVKDQTEPLDR

SEQ ID NO: 72 - protein, 205 aa, Oryza sativa
MNGAGGAGGAAAGKLPMVSHRRVQCRLADKRCELREEEMEYIRQFHRHEPSSNQCTSFVAKHIKAPLQTVWSLVRRFDQPQLFKPFVRKCVMRENIIVTGCVREVNVQSGLPATRSTERLELLDDNEHILKVKFIGGDHMLKNYSSILTIHSEVIDGQLGTLVVESFVVDIPDGNTKDDICYFIENVLRCNLMTLADVSEERLAN

SEQ ID NO: 73 - protein, 197 aa, Zea mays
MVGLVGGSTARAEHVVANAGGETEYVRRLHRHAPAEHQCTSTLVKHIKAPVHLVWELVRSFDQPQRYKPFVRNCVVRGDQLEVGSLRDVNVKTGLPATTSTERLEQLDDDLHILGVKFVGGDHRLQNYSSIITVHPESIDGRPGTLVIESFVVDVPDGNTKDETCYFVEAVIKCNLKSLAEVSEQLAVESPTSPIDQ

SEQ ID NO: 74 - protein, 206 aa, Oryza sativa
MNGVGGAGGAAAGKLPMVSHRRVQWRLADERCELREEEMEYIRRFHRHEPSSNQCTSFAAKHIKAPLHTVWSLVRRFDQPQLFKPFVRNCVMRENIIATGCIREVNVQSGLPATRSTERLELLDDNEHILKVKFIGGDHMLKNYSSILTVHSEVIDGQLGTLVVESFIVDVLEGNTKDDISYFIENVLRCNLRTLADVSEERLANP

SEQ ID NO: 75 - protein, 209 aa, Oryza sativa
MVGLVGGGGWRVGDDAAGGGGGGAVAAGAAAAAEAEHMRRLHSHAPGEHQCSSALVKHIKAPVHLVWSLVRSFDQPQRYKPFVSRCVVRGGDLEIGSVREVNVKTGLPATTSTERLELLDDDEHILSVKFVGGDHRLRNYSSIVTVHPESIDGRPGTLVIESFVVDVPDGNTKDETCYFVEAVIKCNLTSLAEVSERLAVQSPTSPLEQ

SEQ ID NO: 76 - protein, 180 aa, Oryza sativa
MVEMDAGGRPEPSPPSGQCSSAVTMRINAPVHLVWSIVRRFEEPHIFQPFVRGCTMRGSTSLAVGCVREVDFKSGFPAKSSVERLEILDDKEHVFGVRIIGGDHRLKNYSSVLTAKPEVIDGEPATLVSESFVVDVPEGNTADETRHFVEFLIRCNLRSLAMVSQRLLLAQGDLAEPPAQ

SEQ ID NO: 77 - protein, 176 aa, Vitis vinifera
MNGNGLSSMESEYIRRHHRHEPAENQCSSALVKHIKAPVPLVWSLVRRFDQPQKYKPFISRCVVQGNLEIGSLREVDVKSGLPATTSTERLELLDDDEHILSMRIIGGDHRLRNYSSIISLHPEIIDGRPGTMVIESYVVDVPEGNTKDETCYFSLADVSERLAVAGTVTEPIDRM

SEQ ID NO: 78 - protein, 180 aa, Oryza sativa
MVEMDAGGRPEPSPPSGQCSSAVTMRINAPVHLVWSIVRRFEEPHIFQPFVRGCTMRGSTSLAVGCVREVDFKSGFSAKSSVERLEILDDKEHVFGVRIIGGDHRLKNYSSVLTAKPEVIDGEPATLVSESFVIDVPEGNTADETRHFVEFLIRCNLRSLAMVSQRLLLAQGDLAEPPAQ

SEQ ID NO: 79 - protein, 215 aa, Oryza sativa
MPCIPASSPGIPHQHQHQHHRALAGVGMAVGCAAEAAVAAAGVAGTRCGAHDGEVPMEVARHHEHAEPGSGRCCSAVVQHVAAPAAAVWSVVRRFDQPQAYKRFVRSCALLAGDGGLGKVRERLEILDDESHVLSFRVVGGEHRLKNYLSVTTVHPSPSAPTAATVVVESYVVDVPPGNTPEDTRVFVDTIVKCNLQSLAKTAEKLAAGARAAGS

SEQ ID NO: 80 - protein, 186 aa, Rheum australe
MNGDGYGGSEEEFVKRYHEHVLADHQCSSVLVEHINAPLHLVWSLVRSFDQPQKYKPFVSRCVVQGGDLEIGSVREVDVKSGLPATTSMEELELLDDKEHVLRVKFVGGDHRLKNYSSIVSLHPEIIGGRSGTMVIESFIVDIADGNTKEETCYFIESLINCNLKSLSCVSERLAVEDIAERIAQM

SEQ ID NO: 81 - protein, 254 aa, Oryza sativa
MVGLVGGGGWRVGDDAAGGGGGGAVAAGAAAAAEAEHMRRLHSQGPRRAPVQLRARQAHQGSCSPPRIECANFAVFLAARDPKIVWSLVRSFDQPQRYKPFVSRCVVRGGDLEIGSVREVNVKTGLPATTSTERLELLDDDEHILSVKFVGGDHRLRNYSSIVTVHPESIDGRPGTLVIESFVVDVPDGNTKDETCYFVEAVIKCNLTSLAEMVRMISLVLPFMLVDRMSGITCESHLETTLVRCGEYAVLAHV

SEQ ID NO: 82 - protein, 186 aa, Oryza sativa
MEPHMERALREAVASEAERRELEGVVRAHHTGWNAPLAAVWPHRARVRPTRSGTSTSSSRASSPPGDGATVGSVREVAVVSGLPASTSTERLEILDDDRHVLSFRVVGGDHRLRNYRSVTSVTEFSSPSSPPRPYCVVVESYVVDVPEGNTEEDTRMFTDTVVKLNLQKLAAVATSSSPPAAGNHH

SEQ ID NO: 83 - protein, 150 aa, Oryza sativa
MEVVWSIVRRFEEPHIFQPFVRGCTMRGSTSLAVGCVREVDFKSGFPAKSSVERLEILDDKEHVFGVRIIGGDHRLKNYSSVLTAKPEVIDGEPATLVSESFVVDVPEGNTADETRHFVEFLIRCNLRSLAMVSQRLLLAQGDLAEPPGQ

SEQ ID NO: 84 - protein, 206 aa, Oryza sativa
MPYTAPRPSPPQHSRIGGCGGGGVLKAAGAAGHAASCVAVPAEVARHHEHAAGVGQCCSAVVQAIAAPVDAVWRTSTSSGAAASWTATATAGPLPVGSVREFRVLSGLPGTSSRERLEILDDERRVLSFRVVGGEHRLSNYRSVTTVHETAAGAAAAVVVESYVVDVPHGNTADETRMFVDTIVRCNLQSLARTAEQLALAAPRAA

SEQ ID NO: 85 - protein, 396 aa, Vitis vinifera
  VARIANT (1)..(396): Xaa = any amino acid
MPISSLPFSLYTVTPNPLKLITTHAHAFTPHTHIFTLKFMSHTYCPHIHHITSIHYTHLLXPIPHMPLQPPLPPHPILPSMPAFQHLYSTNQHLQVALFSARGPNIRDFNFQDADLLKLDILAPGSLIWAAWSPNGTDEANYVGEGSPTVAMIAKRGPRHGKYMAFCXMYRDNVAPKGVNXAVATVKTKRTIQLKTSLEIACHYAGINISGINGEVMPGQWEYQVGPGQCSSLLAQRVHVPLSAVGSVVHRFDKPQRYQHVIKSCRIEDGFEMRMGXLRDVNIISGLPTATNTGRLDMQDDERHVTRCPHQRQSESKYTENNNSDASSIKSPINGPSEHLKTAASPKTESIIVIDTSKFLNEEDFEGKDETSSSNQVQIEDENWETRFPNTDAGIW

SEQ ID NO: 86 - protein, 443 aa, Vitis vinifera
  VARIANT (1)..(443): Xaa = any amino acid
MPSAXKSSTVPLSLXQFKLGLRHGHRVIPWGDLDSLAMLQRQLDVDILVTGHTHRFTAYKHEGGVVINPGSATGAFGSITYDVNPSFVLMDIDGLRVVVCVYELIDETANIIKELHARKISFGTKSMIXCLLLKRRSTPKFRRKKLFLFQCRVQMTLTLTNLAVSGIAQTLQVDQWTVCALIFMTRRDIHLDKARFLDFKDMGKLLADASGLRKALSGGXVTAGMAIFDTMRHIRPDVPTVCVGLAAVAMIAKRGPRHGKYMAFCPMYRDNVAPKGVNVAVVTVKTKRTIQLKTSLEIACHYAGINISGINGEVMPGQWEYQVGPGQCSSLLAQRVHVPLSAVGSVVHRFDKPQRYQHVIKSCRIEDGFEMRMGRLRDVNIISGLPTATNTGRLDMQDDEXHVTRCPHQRQSESKYTENNNSDASSVKSPINGPSEHLKTAAX

SEQ ID NO: 87 - protein, 95 aa, Oryza sativa
EIGSVREVNVKTGLPATTSTERLELLDDDEHILSVKFVGGDHRLRNYSSIVTVHPESIDGRPGTLVIESFVVDVPDGNTKDETCYFVEAVIKCNL

SEQ ID NO: 88 - protein, 191 aa, Zea mays
MVVEMDGGVGVAAAGGGGAQTPAPPPPRRWRLADERCDLRAMETDYVRRFHRHEPRDHQCSSAVAKHIKAPVHLVWSLVRRFDQPQLFKPFVSRCEMKGNIEIGSVREVNVKSGLPATRSTERLELLDDDERILSVRFVGGDHRLQVCSVLHLSIFCAAHARYFAHHLKCVLEFLCQMHLDVLPCDDAILE

SEQ ID NO: 89 - protein, 239 aa, Oryza sativa
MNGCTGGAGGVAAGRLPAVSLQQAQWKLVDERCELREEEMEYVRRFHRHEIGSNQCNSFIAKHVRAPLQNVWSLVRRFDQPQIYKPFVRKCVMRGNVETGSVREIIVQSGLPATRSIERLEFLDDNEYILRVKFIGGDHMLKKRIPKKTYAISSRTCSDSAIIAVGQSNCAPEITAMNGGVSIQPWLILLAFFSSPSNQTNPDSLRDMHPGSWFQILLVLAMFTCSKGSVLPPSEKVNV

SEQ ID NO: 90 - protein, 188 aa, Zea mays
MEPHMESALRQGLSEAEQRELEGVVRAHHTFPGRAPGTCTSLVTQRVDAPLAAVWPIVRGFGSPQRYKHFIKSCDLKAGDGATVGSVREVTVVSGLPASTSTERLEILDDHRHILSFRVVGGDHRLRNYRSVTSVTEFQPGPYCVVLESYVVDVPDGNTEEDTRMFTDTVVKLNLQKLAAIATSSSAN

SEQ ID NO: 91 - protein, 205 aa, Zea mays
MDQQGAGGDVEVPAGLGLTAAEYEQLRPTVDAHHRYAVGEGQCSSLLAQRIHAPPAAVWAIVRRFDCPQVYKHFIRSCAVRPDPDAGDALRPGRLREVCVISGLPASTSTERLDHLDDAARVFGFSITGGEHRLRNYRSVTTVSELAGPGICTVVLESYAVDVPDGNTEDDTRLFADTVIRLNLQKLKSVAEASTSSSAPPPPSE

SEQ ID NO: 92 - protein, 220 aa, Zea mays
MPCIQASSPGGMPHQHGRGRVLGGGVGCAAEVAAAVAASAGGMRCGAHDGEVPAEAARHHEHAAAGPGRCCSAVVQHVAAPAAAVWSVVRRFDQPQVYKRFVRSCALLAGDGGVGTLREVRVVSGLPAASSRERLEVLDDESHVLSFRVVGGEHRLRNYLSVTTVHPSPAAPDAATVVVESYVVDVPPGNTPEDTRVFVDTIVKCNLQSLATTAEKLAAV

SEQ ID NO: 93 - protein, 221 aa, Glycine max
MEKAESSASTSEPDSDENHHRHPTNHHINPPSGLTPLEFASLIPSVAEHHSYLVGSGQCSSLLAQRVQAPPDAVWSVVRRFDKPQTYKHFIKSCAVKEPFHMAVGVTRDVNVISGLPAATSTERLDLLDDIRCVTGFSIIGGEHRLRNYRSVTTVHSFEDDADDGKIYTVVLESYVVDVPDGNTEEDTRLFADTVVKLNLQKLASVTEGTNRDGDGKSHSR

SEQ ID NO: 94 - protein, 214 aa, Glycine max
MEKTHSSSAEEQDPTRRHLDPPPGLTAEEFEDLKPSVLEHHTYSVTPTRQSSSLLAQRIHAPPHAVWSVVRCFDNPQAYKHFIKSCHVKEGFQLAVGSTRDVHVISGLPAATSTERLDLLDDDRHVIGFTIVGGDHRLRNYRSVTSVHGFECDGKIWTVVLESYVVDVPEGNTEEDTRLFADTVVKLNLQKLASVSEGMCGDGDGDGDGKGNKS

SEQ ID NO: 95 - protein, 216 aa, Glycine max
MLQNSSMSSLLLHRINGGGGATTATNCHDTVFMTVPDGVARYHTHAVAPNQCCSSVAQEIGASVATVWSVLRRFDNPQAYKHFVKSCHVIGGDGDVGTLREVHVISGLPAARSTERLEILDDERHVISFSVVGGDHRLANYRSVTTLHPTASSASGGCSGTVVVESYVVDVPPGNTREDTRVFVDTIVKCNLQSLAQTAENLTLRKNNNNDYKCCS

SEQ ID NO: 96 - protein, 208 aa, Glycine max
MTSLQFHRFNPATDTSTAIANGVNCPKPPSTLRLLAKVSLSVPETVARHHAHPVGPNQCCSVVIQAIDAPVSAVWPVVRRFDNPQAYKHFVKSCHVVAAAGGGEDGIRVGALREVRVVSGLPAVSSTERLEILDDERHVMSFSVVGGDHRLRNYRSVTTLHGDGNGGTVVIESYVVDVPPGNTKEETCVFVDTIVRCNLQSLAQIAET

SEQ ID NO: 97 - protein, 176 aa, Glycine max
AYPVLGLTPEEFSELESIINTHHKFEPSPEICSSIIAQRIDAPAHTVWPLVRSFENPQKYKHFVKSCNMRSGDGGVGSIREVTVVSGLPASTSTERLEILDDDKHLLSFRVVGGEHRLHNYRSVTSVNEFKNPDNGKVYTIVLESYVVDIPEGNTGVDTKMFVDTVVKLNLQKLGE

SEQ ID NO: 98 - protein, 172 aa, Glycine max
EFTELESTINTHHKFEASPEICSSIIAQRIDAPAHTVWPLVRSFENPQKYKHFVKSCNMRSGDGGVGSIREVTVVSGLPASTSTERLEILDDDNHLLSFRVVGGEHRLHNYRSVTSVNEFKRPDNGKVYTIVLESYVVDIPEGNTGVDTKMFVDTVVKLNLQKLGEVAMATN

SEQ ID NO: 99 - protein, 191 aa, Glycine max
MTELSSREVEYIRRHHSKAAEDNQCASALVKHIRAPLPLVWSLVRRFDEPQKYKPFVSRCVVRGNLEIGSLREVDVKSGLPATTSTERLEILDDNHHILSVRIIGGDHRLRNYSSIMSLHPEIVDGRPGTLVIESFVVDIPEGNTKDETCYFVEALIKCNLKSLADVSEGLTLQDHTEPIDRKYELLITRG

SEQ ID NO: 100 - protein, 185 aa, Glycine max
MNGGESYGAIETQYIRRHHKHEPRENQCTSALVKHIRAPVHLVWSLVRRFDQPQKYKPFVSRCIMQGDLGIGSVREVNVKSGLPATTSTERLEQLDDEEHILGIRIVGGDHRLRNYSSIITVHPEVIDGRPGTMVIESFVVDVPDGNTRDETCYFVEALIRCNLSSLADVSERMAVQGRTNPINH

SEQ ID NO: 101 - protein, 178 aa, Glycine max
MSPNNPSTIVSDAVARHHTHVVSPHQCCSAVVQEIAAPVSTVWSVVRRFDNPQAYKHFVKSCHVILGDGDVGTLREVRVISGLPAAVSTERLDVLDDERHVIGFSMVGGDHRLSNYRSVTILHPRSATDTVVVESYVVDVPAGNTTEDTRVFVDTILRCNLQSLAKFAENLTNKLHQR

SEQ ID NO: 102 - protein, 246 aa, Glycine max
MSRSHNKRKPFSFIFKITLLELLSSLLSSSLRFAMDKTHSGEEQDPNPTHPTRNHLDPPPGLTPEEFEDLKPSVLEHHTYSVTPTRQCSSLLAQRIHAPPHTVWTVVRCFDNPQAYKHFIKSCHVKEGFQLAVGSTRDVHVISGLPAATSTERLDLLDDDRHVIGFTIVGGDHRLRNYRSVTSVHGFERDGKIWTVVLESYVVDVPEGNTEEDTRLFADTVVKLNLQKLASVTEGMCGDSDGKGNN

SEQ ID NO: 103 - protein, 223 aa, Glycine max
MEKAESSASTSEPDSDDNHHRHPTNHHLNPPSGLTPLEFASLVPSVAEHHSYLVGPGQCSSLLAQRVHAPPDAVWSFVRRFDKPQTYKHFIKSCAVKEPFHMAVGVTRDVNVISGLPAATSTERLDFLDDVRRVTGFSIIGGEHRLRNYRSVTTVHSFDDDNASADGKIYTVVLESYVVDVPDGNTEEDTRLFADTVVKLNLQKLASVTEGTNGDGDGKPHSR

SEQ ID NO: 104 - protein, 229 aa, Glycine max
MPSSLHFDRFNPITHAATTVAIANGVNCPKQPQAPPSSTAARRLVVPSLSSGRGIAAPDTVALHHAHVVDPNQCCSIVTQHINAPVSAVWAVVRRFDNPQGYKNFVRSCHVITGDGIRVGAVREVRVVSGLPAETSTERLEILDDERHVISFSMVGGDHRLRNYQSVTTLHANGNGTLVIESYVVDVPQGNTKEETCVFVDTIVRCNLQSLAQIAENRTNNCEHTAQHC

SEQ ID NO: 105 - protein, 191 aa, Glycine max
MNGIGNDGGGGLSNVEMEYIRRHHRHEPGENQCGSALVKHIRAPVPQVWSLVRRFDQPQKYKPFVSRCVVRGNLEIGSLREVDVKSGLPATTSTERLELLDDNEHLLSIRIIGGDHRLRNYSSIMSLHPEIIDGRPGTLVIESFVVDVPEGNTKDETCYFVEALIKCNLKSLADVSEGIAVQDRTEPIDRI

SEQ ID NO: 106 - protein, 169 aa, Glycine max
MVARHHAHAVGPNQCCSFVIQAIDAPVSAVWPVVRRFDNPQAYKHFVKSCHVVAAGGAGGDGGIHVGALREVRVVSGLPAVSSTERLEILDDERHVMSFSVVGGDHRLRNYRSVTTLHGDGSNGGTVVIESYVVDIPAGNTKEETCVFVDTIVRCNLQSLAQMAENMGS

SEQ ID NO: 107 - protein, 210 aa, Glycine max
MTILPHSNNKSSNHKFIAHQNYMASETHHHVQGLTPEELTKLEPIIKKYHLFEQSPNTCFSIITYRIEAPAKAVWPFVRSFDNPQKYKHFIKGCNMRGDGGVGSIREVTVVSGLPASTSTERLEILDDDKHVLSFRVVGGEHRLKNYRSVTSVNEFNKEGKVYTIVLESYIVDIPEGNTEEDTKMFVDTVVKLNLQKLGVVAMASSMHGQ

SEQ ID NO: 108 - protein, 193 aa, Glycine max
MNRIGNGGGGGGGLSNVEMEYIRRHHRHEPGENQCGSALVKHIRAPVPQVWSLVRRFDQPQKYKPFISRCVVRGNLEIGSLREVDVKSGLPATTSTERLELLDDNEHILSIRIIGGDHRLRNYSSIMSLHPEIIDGRPGTLVIESFVVDVPEGNTKDETCYFVEALIKCNLKSLADVSEGLAVQDCTEPIDRI

SEQ ID NO: 109 - protein, 188 aa, Glycine max
MASETHHHVQGLTPEELTQLEPIIKKYHLFEASSNKCFSIITHRIEAPASSVWPLVRNFDNPQKYKHFIKGCNMKGDGSVGSIREVTVVSGLPASTSTERLEILDDDKHVLSFRVVGGEHRLQNYRSVTSVNEFHKEGKVYTIVLESYIVDIPEGNTEEDTKMFVDTVVKLNLQKLGVVAMASSMNGR

SEQ ID NO: 110 - protein, 177 aa, Glycine max
MLPNNPSTIVPDAVARHHTHVVSPQQCCSAVVQEIAAPVSTVWSVVRRFDNPQAYKHFVKSCHVILGDGDVGTLREVHVISGLPAAVSTERLDVLDDERHVIGFSMVGGDHRLFNYRSVTTLHPRSAAGTVVVESYVVDVPPGNTTEDTRVFVDTILRCNLQSLAKFAENLTKLHQR

SEQ ID NO: 111 - protein, 185 aa, Glycine max; identical to SEQ ID NO: 100

SEQ ID NO: 112 - protein, 191 aa, Glycine max
MGITIGIQCLEIEEISICDGMFCYLVDFVDVKEKMNYCLMWFGYFPSQVWSLVRRFDQPQKYKPFVSRCIMQGDLGIGSVREVNVKSGLPATTSTERLEQLDDEEHILGIRIVGGDHRLRNYSSIITVHPEVIDGRPSTMVIESFVVDVPDGNTRDETCYFVEALIRCNLSSLADVSERMAVQGRTDPINH

SEQ ID NO: 113 - protein, 185 aa, Artificial Sequence
  synthetic PYR/PYL receptor protein
MNGGESYGAIETQYIRRHHKHEPRENQCTSALVKHIRAPVHLVWSLVRRFDQPQKYKPFVSRCIMQGDLGIGSVREVNVKSGLPATTSTERLEQLDDEEHILGIRIVGGDHRLRNYSSIITVHPEVIDGRPSTMVIESFVVDVPDGNTRDETCYFVEALIRCNLSSLADVSERMAVQGRTDPINH

SEQ ID NO: 114 - protein, 204 aa, Sorghum bicolor
METHVERALRATLTEAEVRALEPAVREHHTFPAGRVAAGTTTPTPTTCTSLVAQRVSAPVRAVWPIVRSFGNPQRYKHFVRTCALAAGDGASVGSVREVTVVSGLPASSSTERLEVLDDDRHILSFRVVGGDHRLRNYRSVTSVTEFQPGPYCVVVESYAVDVPEGNTAEDTRMFTDTVVRLNLQKLAAVAEESAAAAAAGNRR

SEQ ID NO: 115 - protein, 204 aa, Sorghum bicolor
MEPHMETALRQGGLSELEQRELEPVVRAHHTFPGRSPGTTCTSLVTQRVDAPLSAVWPIVRGFAAPQRYKHFIKSCDLRSGDGATVGSVREVTVVSGLPASTSTERLEILDDDRHILSFRVVGGDHRLRNYRSVTSVTEFHHHHQAAAGRPYCVVVESYVVDVPEGNTEEDTRMFTDTVVKLNLQKLAAIATSSAAAAASNSST

SEQ ID NO: 116 - protein, 258 aa, Sorghum bicolor
MVESPNPNSPSRPLCIKYTRAPARHFSPPLPFSSLIISANPIEPKAMDKQGAGGDVEVPAGLGLTAAEYEQLRSTVDAHHRYAVGEGQCSSLLAQRIQAPPAAVWAIVRRFDCPQVYKHFIRSCALRPDPEAGDALRPGRLREVSVISGLPASTSTERLDLLDDAARVFGFSITGGEHRLRNYRSVTTVSELADPGICTVVLESYVVDVPDGNTEDDTRLFADTVIRLNLQKLKSVAEANAAAAASFVSVVPPPEPEE

SEQ ID NO: 117 - protein, 222 aa, Sorghum bicolor
MPCLQASSSPGSMPHQHHGRVLAGVGCAAEVAAAAVAATSPAAGMRCGAHDGEVPAEAARHHEHAAPGPGRCCSAVVQHVAAPASAVWSVVRRFDQPQAYKRFVRSCALLAGDGGVGTLREVRVVSGLPAASSRERLEVLDDESHVLSFRVVGGEHRLQNYLSVTTVHPSPAAPDAATVVVESYVVDVPPGNTPEDTRVFVDTIVKCNLQSLATTAEKLAAV

SEQ ID NO: 118 - protein, 211 aa, Sorghum bicolor
MVEMDGGVGVVGGGQQTPAPRRWRLADELRCDLRAMETDYVRRFHRHEPRDHQCSSAVAKHIKAPVHLVWSLVRRFDQPQLFKPFVSRCEMKGNIEIGSVREVNVKSGLPATRSTERLELLDDNEHILSVKFVGGDHRLQNYSSILTVHPEVIDGRPGTLVIESFVVDVPDGNTKDETCYFVEALLKCNLKSLAEVSERQVIKDQTEPLDR

SEQ ID NO: 119 - protein, 216 aa, Sorghum bicolor
MPYTAPRPSPQQHSRVTGGGAKAAIVAASHGASCAAVPAEVARHHEHAARAGQCCSAVVQAIAAPVGAVWSVVRRFDRPQAYKHFIRSCRLVDDGGGGAGAGAGATVAVGSVREVRVVSGLPATSSRERLEILDDERRVLSFRVVGGEHRLANYRSVTTVHEAEAGAGGTVVVESYVVDVPPGNTADETRVFVDTIVRCNLQSLARTAERLALALA

SEQ ID NO: 120 - protein, 36 aa, Artificial Sequence
  synthetic hypersensitive PYR/PYL receptor consensus sequence
  VARIANT (1)..(36): Xaa = any amino acid
CXSXXXXXXXAPXXXXWXXXXXFXXPXXXXXFXXXC

SEQ ID NO: 121 - protein, 25 aa, Artificial Sequence
  synthetic hypersensitive PYR/PYL receptor consensus sequence
  VARIANT (1)..(25): Xaa = any amino acid
GXXRXVXXXSXXPAXXSXEXLXXXD

SEQ ID NO: 122 - protein, 11 aa, Artificial Sequence
  synthetic hypersensitive PYR/PYL receptor consensus sequence
  VARIANT (1)..(11): Xaa = any amino acid
GGXHRLXNYXS

SEQ ID NO: 123 - protein, 31 aa, Artificial Sequence
  synthetic hypersensitive PYR/PYL receptor consensus sequence
  VARIANT (1)..(31): Xaa = any amino acid
ESXXVDXPXGXXXXXTXXFXXXXXXXNLXXL

SEQ ID NO: 124 - protein, 191 aa, Artificial Sequence
  synthetic Arabidopsis PYR1 mutant F61L
MPSELTPEERSELKNSIAEFHTYQLDPGSCSSLHAQRIHAPPELVWSIVRRFDKPQTYKHLIKSCSVEQNFEMRVGCTRDVIVISGLPANTSTERLDILDDERRVTGFSIIGGEHRLTNYKSVTTVHRFEKENRIWTVVLESYVVDMPEGNSEDDTRMFADTVVKLNLQKLATVAEAMARNSGDGSGSQVT

SEQ ID NO: 125 - protein, 191 aa, Artificial Sequence
  synthetic Arabidopsis PYR1 mutant F61M
MPSELTPEERSELKNSIAEFHTYQLDPGSCSSLHAQRIHAPPELVWSIVRRFDKPQTYKHMIKSCSVEQNFEMRVGCTRDVIVISGLPANTSTERLDILDDERRVTGFSIIGGEHRLTNYKSVTTVHRFEKENRIWTVVLESYVVDMPEGNSEDDTRMFADTVVKLNLQKLATVAEAMARNSGDGSGSQVT

SEQ ID NO: 126 - protein, 191 aa, Artificial Sequence
  synthetic Arabidopsis PYR1 mutant V81I
MPSELTPEERSELKNSIAEFHTYQLDPGSCSSLHAQRIHAPPELVWSIVRRFDKPQTYKHFIKSCSVEQNFEMRVGCTRDIIVISGLPANTSTERLDILDDERRVTGFSIIGGEHRLTNYKSVTTVHRFEKENRIWTVVLESYVVDMPEGNSEDDTRMFADTVVKLNLQKLATVAEAMARNSGDGSGSQVT

SEQ ID NO: 127 - protein, 191 aa, Artificial Sequence
  synthetic Arabidopsis PYR1 mutant V81Y
MPSELTPEERSELKNSIAEFHTYQLDPGSCSSLHAQRIHAPPELVWSIVRRFDKPQTYKHFIKSCSVEQNFEMRVGCTRDYIVISGLPANTSTERLDILDDERRVTGFSIIGGEHRLTNYKSVTTVHRFEKENRIWTVVLESYVVDMPEGNSEDDTRMFADTVVKLNLQKLATVAEAMARNSGDGSGSQVT

SEQ ID NO: 128 - protein, 191 aa, Artificial Sequence
  synthetic Arabidopsis PYR1 mutant I110C
MPSELTPEERSELKNSIAEFHTYQLDPGSCSSLHAQRIHAPPELVWSIVRRFDKPQTYKHFIKSCSVEQNFEMRVGCTRDVIVISGLPANTSTERLDILDDERRVTGFSCIGGEHRLTNYKSVTTVHRFEKENRIWTVVLESYVVDMPEGNSEDDTRMFADTVVKLNLQKLATVAEAMARNSGDGSGSQVT

SEQ ID NO: 129 - protein, 191 aa, Artificial Sequence
  synthetic Arabidopsis PYR1 mutant I110S
MPSELTPEERSELKNSIAEFHTYQLDPGSCSSLHAQRIHAPPELVWSIVRRFDKPQTYKHFIKSCSVEQNFEMRVGCTRDVIVISGLPANTSTERLDILDDERRVTGFSSIGGEHRLTNYKSVTTVHRFEKENRIWTVVLESYVVDMPEGNSEDDTRMFADTVVKLNLQKLATVAEAMARNSGDGSGSQVT

SEQ ID NO: 130 - protein, 191 aa, Artificial Sequence
  synthetic Arabidopsis PYR1 mutant E141C
MPSELTPEERSELKNSIAEFHTYQLDPGSCSSLHAQRIHAPPELVWSIVRRFDKPQTYKHFIKSCSVEQNFEMRVGCTRDVIVISGLPANTSTERLDILDDERRVTGFSIIGGEHRLTNYKSVTTVHRFEKENRIWTVVLCSYVVDMPEGNSEDDTRMFADTVVKLNLQKLATVAEAMARNSGDGSGSQVT

SEQ ID NO: 131 - protein, 191 aa, Artificial Sequence
  synthetic Arabidopsis PYR1 mutant E141I
MPSELTPEERSELKNSIAEFHTYQLDPGSCSSLHAQRIHAPPELVWSIVRRFDKPQTYKHFIKSCSVEQNFEMRVGCTRDVIVISGLPANTSTERLDILDDERRVTGFSIIGGEHRLTNYKSVTTVHRFEKENRIWTVVLISYVVDMPEGNSEDDTRMFADTVVKLNLQKLATVAEAMARNSGDGSGSQVT

SEQ ID NO: 132 - protein, 191 aa, Artificial Sequence
  synthetic Arabidopsis PYR1 mutant E141L
MPSELTPEERSELKNSIAEFHTYQLDPGSCSSLHAQRIHAPPELVWSIVRRFDKPQTYKHFIKSCSVEQNFEMRVGCTRDVIVISGLPANTSTERLDILDDERRVTGFSIIGGEHRLTNYKSVTTVHRFEKENRIWTVVLLSYVVDMPEGNSEDDTRMFADTVVKLNLQKLATVAEAMARNSGDGSGSQVT

SEQ ID NO: 133 - protein, 191 aa, Artificial Sequence
  synthetic Arabidopsis PYR1 mutant E141M
MPSELTPEERSELKNSIAEFHTYQLDPGSCSSLHAQRIHAPPELVWSIVRRFDKPQTYKHFIKSCSVEQNFEMRVGCTRDVIVISGLPANTSTERLDILDDERRVTGFSIIGGEHRLTNYKSVTTVHRFEKENRIWTVVLMSYVVDMPEGNSEDDTRMFADTVVKLNLQKLATVAEAMARNSGDGSGSQVT

SEQ ID NO: 134 - protein, 191 aa, Artificial Sequence
  synthetic Arabidopsis PYR1 mutant E141N
MPSELTPEERSELKNSIAEFHTYQLDPGSCSSLHAQRIHAPPELVWSIVRRFDKPQTYKHFIKSCSVEQNFEMRVGCTRDVIVISGLPANTSTERLDILDDERRVTGFSIIGGEHRLTNYKSVTTVHRFEKENRIWTVVLNSYVVDMPEGNSEDDTRMFADTVVKLNLQKLATVAEAMARNSGDGSGSQVT

SEQ ID NO: 135 - protein, 191 aa, Artificial Sequence
  synthetic Arabidopsis PYR1 mutant E141T
MPSELTPEERSELKNSIAEFHTYQLDPGSCSSLHAQRIHAPPELVWSIVRRFDKPQTYKHFIKSCSVEQNFEMRVGCTRDVIVISGLPANTSTERLDILDDERRVTGFSIIGGEHRLTNYKSVTTVHRFEKENRIWTVVLTSYVVDMPEGNSEDDTRMFADTVVKLNLQKLATVAEAMARNSGDGSGSQVT

SEQ ID NO: 136 - protein, 191 aa, Artificial Sequence
  synthetic Arabidopsis PYR1 mutant E141V
MPSELTPEERSELKNSIAEFHTYQLDPGSCSSLHAQRIHAPPELVWSIVRRFDKPQTYKHFIKSCSVEQNFEMRVGCTRDVIVISGLPANTSTERLDILDDERRVTGFSIIGGEHRLTNYKSVTTVHRFEKENRIWTVVLVSYVVDMPEGNSEDDTRMFADTVVKLNLQKLATVAEAMARNSGDGSGSQVT

SEQ ID NO: 137 - protein, 191 aa, Artificial Sequence
  synthetic Arabidopsis PYR1 mutant E141W
MPSELTPEERSELKNSIAEFHTYQLDPGSCSSLHAQRIHAPPELVWSIVRRFDKPQTYKHFIKSCSVEQNFEMRVGCTRDVIVISGLPANTSTERLDILDDERRVTGFSIIGGEHRLTNYKSVTTVHRFEKENRIWTVVLWSYVVDMPEGNSEDDTRMFADTVVKLNLQKLATVAEAMARNSGDGSGSQVT

SEQ ID NO: 138 - protein, 191 aa, Artificial Sequence
  synthetic Arabidopsis PYR1 mutant E141Y
MPSELTPEERSELKNSIAEFHTYQLDPGSCSSLHAQRIHAPPELVWSIVRRFDKPQTYKHFIKSCSVEQNFEMRVGCTRDVIVISGLPANTSTERLDILDDERRVTGFSIIGGEHRLTNYKSVTTVHRFEKENRIWTVVLYSYVVDMPEGNSEDDTRMFADTVVKLNLQKLATVAEAMARNSGDGSGSQVT

SEQ ID NO: 139 - protein, 191 aa, Artificial Sequence
  synthetic Arabidopsis PYR1 mutant A160C
MPSELTPEERSELKNSIAEFHTYQLDPGSCSSLHAQRIHAPPELVWSIVRRFDKPQTYKHFIKSCSVEQNFEMRVGCTRDVIVISGLPANTSTERLDILDDERRVTGFSIIGGEHRLTNYKSVTTVHRFEKENRIWTVVLESYVVDMPEGNSEDDTRMFCDTVVKLNLQKLATVAEAMARNSGDGSGSQVT

SEQ ID NO: 140 - protein, 191 aa, Artificial Sequence
  synthetic Arabidopsis PYR1 mutant A160I
MPSELTPEERSELKNSIAEFHTYQLDPGSCSSLHAQRIHAPPELVWSIVRRFDKPQTYKHFIKSCSVEQNFEMRVGCTRDVIVISGLPANTSTERLDILDDERRVTGFSIIGGEHRLTNYKSVTTVHRFEKENRIWTVVLESYVVDMPEGNSEDDTRMFIDTVVKLNLQKLATVAEAMARNSGDGSGSQVT

SEQ ID NO: 141 - protein, 191 aa, Artificial Sequence
  synthetic Arabidopsis PYR1 mutant A160V
MPSELTPEERSELKNSIAEFHTYQLDPGSCSSLHAQRIHAPPELVWSIVRRFDKPQTYKHFIKSCSVEQNFEMRVGCTRDVIVISGLPANTSTERLDILDDERRVTGFSIIGGEHRLTNYKSVTTVHRFEKENRIWTVVLESYVVDMPEGNSEDDTRMFVDTVVKLNLQKLATVAEAMARNSGDGSGSQVT

SEQ ID NO: 142 - protein, 174 aa, Artificial Sequence
  synthetic middle portion of Zea mays PYR/PYL (ZmPYLc)
AGVPDEVARHHEHAVAAGQCCAAMVQSIAAPVDAVWSLVRRFDQPQRYKRFIRSCHLVDGDGAEVGSVRELLLVSGLPAESSRERLEIRDDERRVISFRVLGGDHRLANYRSVTTVHEAAPSQDGRPLTMVVESYVVDVPPGNTVEETRIFVDTIVRCNLQSLEGTVIRQLEIA

SEQ ID NO: 143 - protein, 172 aa, Artificial Sequence
  synthetic middle portion of Zea mays PYR/PYL (ZmPYLl)
AGVPDEVARHHEHAVAAGQCCSVMVQSIAAPADAVWSLVRRFDQPQGYKRFIRSCHLVDGDGVEVGSVRELLVVSGLPAENSRERLEIRDDERRVISFRILGGDHRLANYRSVTTVHEAASEGGPLTMVVESYVVDVPPGNTVEETRIFVDTIVRCNLQSLEDTVIRQQAMA

SEQ ID NO: 144 - protein, 170 aa, Artificial Sequence
  synthetic middle portion of Zea mays PYR/PYL (ZmPYLa)
CAAVPAEVARHHEHAARAGQCCSAVVQAIAAPVGAVWSVVRRFDRPQAYKHFIRSCRLVGGGDVAVGSVREVRVVSGLPATSSRERLEILDDERRVLSFRVVGGEHRLANYRSVTTVHEAGAGAGTGTVVVESYVVDVPHGNTADETRVFVDTIVRCNLQSLARTAERLA

SEQ ID NO: 145 - protein, 171 aa, Artificial Sequence
  synthetic middle portion of Zea mays PYR/PYL (ZmPYLb)
GEVPAEAARHHEHAAAGPGRCCSAVVQHVAAPAAAVWSVVRRFDQPQVYKRFVRSCALLAGDGGVGTLREVRVVSGLPAASSRERLEVLDDESHVLSFRVVGGEHRLRNYLSVTTVHPSPAAPDAATVVVESYVVDVPPGNTPEDTRVFVDTIVKCNLQSLATTAEKLAAV

SEQ ID NO: 146 - protein, 172 aa, Artificial Sequence
  synthetic middle portion of Zea mays PYR/PYL (ZmPYLo)
GEVPAEAARHHEHAAPGPGRCCSAVVQRVAAPAEAVWSVVRRFDQPQAYKRFVRSCALLAGDGGVGTLREVRVVSGLPAASSRERLEVLDDESHVLSFRVVGGEHRLQNYLSVTTVHPSPAAPDAATVVVESYVVDVPPGNTPEDTRVFVDTIVKCNLQSLATTAEKLALAA

SEQ ID NO: 147 - protein, 174 aa, Artificial Sequence
  synthetic middle portion of Zea mays PYR/PYL (ZmPYLi)
QLRSTVDAHHRYAVGEGQCSSLLAQRIHAPPEAVWAVVRRFDCPQVYKHFIRSCALRPDPEAGDALCPGRLREVSVISGLPASTSTERLDLLDDAARVFGFSITGGEHRLRNYRSVTTVSELADPAICTVVLESYVVDVPDGNTEDDTRLFADTVIRLNLQKLKSVAEANAAEA

SEQ ID NO: 148 - protein, 174 aa, Artificial Sequence
  synthetic middle portion of Zea mays PYR/PYL (ZmPYLk)
QLRPTVDAHHRYAVGEGQCSSLLAQRIHAPPAAVWAIVRRFDCPQVYKHFIRSCAVRPDPDAGDALRPGRLREVCVISGLPASTSTERLDHLDDAARVFGFSITGGEHRLRNYRSVTTVSELAGPGICTVVLESYAVDVPDGNTEDDTRLFADTVIRLNLQKLKSVAEASTSSS

SEQ ID NO: 149 - protein, 171 aa, Artificial Sequence
  synthetic middle portion of Arabidopsis thaliana PYR/PYL (AtPyrl)
ELKNSIAEFHTYQLDPGSCSSLHAQRIHAPPELVWSIVRRFDKPQTYKHFIKSCSVEQNFEMRVGCTRDVIVISGLPANTSTERLDILDDERRVTGFSIIGGEHRLTNYKSVTTVHRFEKENRIWTVVLESYVVDMPEGNSEDDTRMFADTVVKLNLQKLATVAEAMARNS

SEQ ID NO: 150 - protein, 169 aa, Artificial Sequence
  synthetic middle portion of Zea mays PYR/PYL (ZmPYLj)
ELEGVVRAHHTFPGRAPGTCTSLVTQRVDAPLAAVWPIVRGFGSPQRYKHFIKSCDLKAGDGATVGSVREVTVVSGLPASTSTERLEILDDHRHILSFRVVGGDHRLRNYRSVTSVTEFQPGPYCVVLESYVVDVPDGNTEEDTRMFTDTVVKLNLQKLAAIATSSSAN

SEQ ID NO: 151 - protein, 171 aa, Artificial Sequence
  synthetic middle portion of Zea mays PYR/PYL (ZmPYLd)
RAMETDYVRRFHRHEPRDHQCSSAVAKHIKAPVHLVWSLVRRFDQPQLFKPFVSRCEMKGNIEIGSVREVNVKSGLPATRSTERLELLDDDERILSVRFVGGDHRLQNYSSILTVHPEVIDGRPGTLVIESFVVDVPDGNTKDETCYFVEALLKCNLRSLAEVSEGQVIMD

SEQ ID NO: 152 - protein, 171 aa, Artificial Sequence
  synthetic middle portion of Zea mays PYR/PYL (ZmPYLf)
RAMETDYVRRFHRHEPREHQCSSAVAKHIKAPVHLVWSLVRRFDQPQLFKPFVSRCEMKGNIEIGSVREVNVKSGLPATRSTERLELLDDNEHILSVRFVGGDHRLQNYSSILTVHPEVIDGRPGTLVIESFVVDVPDGNTKDETCYFVEALLKCNLKSLAEVSERQVVKD

SEQ ID NO: 153 - protein, 172 aa, Artificial Sequence
  synthetic middle portion of Zea mays PYR/PYL (ZmPYLe)
AGGEAEYVRRMHRHAPTEHQCTSTLVKHIKAPVHLVWELVRRFDQPQRYKPFVRNCVVRGDQLEVGSLRDVNVKTGLPATTSTERLEQLDDDLHILGVKFVGGDHRLQNYSSIITVHPESIDGRPGTLVIESFVVDVPDGNTKDETCYFVEAVIKCNLNSLAEVSEQLAVES

SEQ ID NO: 154 - protein, 172 aa, Artificial Sequence
  synthetic middle portion of Zea mays PYR/PYL (ZmPYLg)
AGGETEYVRRLHRHAPAEHQCTSTLVKHIKAPVHLVWELVRSFDQPQRYKPFVRNCVVRGDQLEVGSLRDVNVKTGLPATTSTERLEQLDDDLHILGVKFVGGDHRLQNYSSIITVHPESIDGRPGTLVIESFVVDVPDGNTKDETCYFVEAVIKCNLKSLAEVSEQLAVES

SEQ ID NO: 155 - protein, 233 aa, Artificial Sequence
  synthetic ZmPYLc homologous to AtPYR1 A160C
MRERNSSIDQEHQRGSSSRSTMPFAASRTSQQQHSRVATNGRAVAVCAGHAGVPDEVARHHEHAVAAGQCCAAMVQSIAAPVDAVWSLVRRFDQPQRYKRFIRSCHLVDGDGAEVGSVRELLLVSGLPAESSRERLEIRDDERRVISFRVLGGDHRLANYRSVTTVHEAAPSQDGRPLTMVVESYVVDVPPGNTVEETRIFCDTIVRCNLQSLEGTVIRQLEIAAMPHDDNQN

SEQ ID NO: 156 - protein, 213 aa, Artificial Sequence
  synthetic ZmPYLl homologous to AtPYR1 A160C
MPYAATRTSPQQHSRVASNGRAVAACAGHAGVPDEVARHHEHAVAAGQCCSVMVQSIAAPADAVWSLVRRFDQPQGYKRFIRSCHLVDGDGVEVGSVRELLVVSGLPAENSRERLEIRDDERRVISFRILGGDHRLANYRSVTTVHEAASEGGPLTMVVESYVVDVPPGNTVEETRIFCDTIVRCNLQSLEDTVIRQQAMAAPAAPHNDHNHS

SEQ ID NO: 157 - protein, 200 aa, Artificial Sequence
  synthetic ZmPYLa homologous to AtPYR1 A160C
MPYTAPRPSPQQHSRVLSGGGAKAASHGASCAAVPAEVARHHEHAARAGQCCSAVVQAIAAPVGAVWSVVRRFDRPQAYKHFIRSCRLVGGGDVAVGSVREVRVVSGLPATSSRERLEILDDERRVLSFRVVGGEHRLANYRSVTTVHEAGAGAGTGTVVVESYVVDVPHGNTADETRVFCDTIVRCNLQSLARTAERLA

SEQ ID NO: 158 - protein, 220 aa, Artificial Sequence
  synthetic ZmPYLb homologous to AtPYR1 A160C
MPCIQASSPGGMPHQHGRGRVLGGGVGCAAEVAAAVAASAGGMRCGAHDGEVPAEAARHHEHAAAGPGRCCSAVVQHVAAPAAAVWSVVRRFDQPQVYKRFVRSCALLAGDGGVGTLREVRVVSGLPAASSRERLEVLDDESHVLSFRVVGGEHRLRNYLSVTTVHPSPAAPDAATVVVESYVVDVPPGNTPEDTRVFCDTIVKCNLQSLATTAEKLAAV

SEQ ID NO: 159 - protein, 218 aa, Artificial Sequence
  synthetic ZmPYLo homologous to AtPYR1 A160C
MPCLQASSPGSMPYQHHGRGVGCAAEAGAAVGASAGTGTRCGAHDGEVPAEAARHHEHAAPGPGRCCSAVVQRVAAPAEAVWSVVRRFDQPQAYKRFVRSCALLAGDGGVGTLREVRVVSGLPAASSRERLEVLDDESHVLSFRVVGGEHRLQNYLSVTTVHPSPAAPDAATVVVESYVVDVPPGNTPEDTRVFCDTIVKCNLQSLATTAEKLALAAV

SEQ ID NO: 160 - protein, 212 aa, Artificial Sequence
  synthetic ZmPYLi homologous to AtPYR1 A160C
MDQQGAGGDAEVPAGLGLTAAEYEQLRSTVDAHHRYAVGEGQCSSLLAQRIHAPPEAVWAVVRRFDCPQVYKHFIRSCALRPDPEAGDALCPGRLREVSVISGLPASTSTERLDLLDDAARVFGFSITGGEHRLRNYRSVTTVSELADPAICTVVLESYVVDVPDGNTEDDTRLFCDTVIRLNLQKLKSVAEANAAEAAATTNSVLLPRPAE

SEQ ID NO: 161 - protein, 205 aa, Artificial Sequence
  synthetic ZmPYLk homologous to AtPYR1 A160C
MDQQGAGGDVEVPAGLGLTAAEYEQLRPTVDAHHRYAVGEGQCSSLLAQRIHAPPAAVWAIVRRFDCPQVYKHFIRSCAVRPDPDAGDALRPGRLREVCVISGLPASTSTERLDHLDDAARVFGFSITGGEHRLRNYRSVTTVSELAGPGICTVVLESYAVDVPDGNTEDDTRLFCDTVIRLNLQKLKSVAEASTSSSAPPPPSE

SEQ ID NO: 162 - protein, 188 aa, Artificial Sequence
  synthetic ZmPYLj homologous to AtPYR1 A160C
MEPHMESALRQGLSEAEQRELEGVVRAHHTFPGRAPGTCTSLVTQRVDAPLAAVWPIVRGFGSPQRYKHFIKSCDLKAGDGATVGSVREVTVVSGLPASTSTERLEILDDHRHILSFRVVGGDHRLRNYRSVTSVTEFQPGPYCVVLESYVVDVPDGNTEEDTRMFCDTVVKLNLQKLAAIATSSSAN

SEQ ID NO: 163 - protein, 214 aa, Artificial Sequence
  synthetic ZmPYLd homologous to AtPYR1 A160C
MVVEMDGGVGVAAAGGGGAQTPAPPPPRRWRLADERCDLRAMETDYVRRFHRHEPRDHQCSSAVAKHIKAPVHLVWSLVRRFDQPQLFKPFVSRCEMKGNIEIGSVREVNVKSGLPATRSTERLELLDDDERILSVRFVGGDHRLQNYSSILSVTEFQPGPYCVVLESYVVDVPDGNTEEDTRMFCDTVVKLNLQKLAAIATSSSANQTEPLDR

SEQ ID NO: 164 - protein, 209 aa, Artificial Sequence
  synthetic ZmPYLf homologous to AtPYR1 A160C
MVMVEMDGGVGGGGGGGQTPAPRRWRLADERCDLRAMETDYVRRFHRHEPREHQCSSAVAKHIKAPVHLVWSLVRRFDQPQLFKPFVSRCEMKGNIEIGSVREVNVKSGLPATRSTERLELLDDNEHILSVRFVGGDHRLQNYSSILSVTEFQPGPYCVVLESYVVDVPDGNTEEDTRMFCDTVVKLNLQKLAAIATSSSANQTEPLDR

SEQ ID NO: 165 - protein, 197 aa, Artificial Sequence
  synthetic ZmPYLe homologous to AtPYR1 A160C
MVGLVGGSTARAEHVVANAGGEAEYVRRMHRHAPTEHQCTSTLVKHIKAPVHLVWELVRRFDQPQRYKPFVRNCVVRGDQLEVGSLRDVNVKTGLPATTSTERLEQLDDDLHILGVKFVGGDHRLQNYSSIITVHPESIDGRPGTLVIESFVVDVPDGNTKDETCYFCEAVIKCNLNSLAEVSEQLAVESPTSLIDQ

SEQ ID NO: 166 - protein, 197 aa, Artificial Sequence
  synthetic ZmPYLg homologous to AtPYR1 A160C
MVGLVGGSTARAEHVVANAGGETEYVRRLHRHAPAEHQCTSTLVKHIKAPVHLVWELVRSFDQPQRYKPFVRNCVVRGDQLEVGSLRDVNVKTGLPATTSTERLEQLDDDLHILGVKFVGGDHRLQNYSSIITVHPESIDGRPGTLVIESFVVDVPDGNTKDETCYFCEAVIKCNLKSLAEVSEQLAVESPTSPIDQ

SEQ ID NO: 167 - protein, 233 aa, Artificial Sequence
  synthetic ZmPYLc homologous to AtPYR1 A160I
MRERNSSIDQEHQRGSSSRSTMPFAASRTSQQQHSRVATNGRAVAVCAGHAGVPDEVARHHEHAVAAGQCCAAMVQSIAAPVDAVWSLVRRFDQPQRYKRFIRSCHLVDGDGAEVGSVRELLLVSGLPAESSRERLEIRDDERRVISFRVLGGDHRLANYRSVTTVHEAAPSQDGRPLTMVVESYVVDVPPGNTVEETRIFIDTIVRCNLQSLEGTVIRQLEIAAMPHDDNQN

SEQ ID NO: 168 - protein, 213 aa, Artificial Sequence
  synthetic ZmPYLl homologous to AtPYR1 A160I
MPYAATRTSPQQHSRVASNGRAVAACAGHAGVPDEVARHHEHAVAAGQCCSVMVQSIAAPADAVWSLVRRFDQPQGYKRFIRSCHLVDGDGVEVGSVRELLVVSGLPAENSRERLEIRDDERRVISFRILGGDHRLANYRSVTTVHEAASEGGPLTMVVESYVVDVPPGNTVEETRIFIDTIVRCNLQSLEDTVIRQQAMAAPAAPHNDHNHS

SEQ ID NO: 169 - protein, 200 aa, Artificial Sequence
  synthetic ZmPYLa homologous to AtPYR1 A160I
MPYTAPRPSPQQHSRVLSGGGAKAASHGASCAAVPAEVARHHEHAARAGQCCSAVVQAIAAPVGAVWSVVRRFDRPQAYKHFIRSCRLVGGGDVAVGSVREVRVVSGLPATSSRERLEILDDERRVLSFRVVGGEHRLANYRSVTTVHEAGAGAGTGTVVVESYVVDVPHGNTADETRVFIDTIVRCNLQSLARTAERLA

SEQ ID NO: 170 - protein, 220 aa, Artificial Sequence
  synthetic ZmPYLb homologous to AtPYR1 A160I
MPCIQASSPGGMPHQHGRGRVLGGGVGCAAEVAAAVAASAGGMRCGAHDGEVPAEAARHHEHAAAGPGRCCSAVVQHVAAPAAAVWSVVRRFDQPQVYKRFVRSCALLAGDGGVGTLREVRVVSGLPAASSRERLEVLDDESHVLSFRVVGGEHRLRNYLSVTTVHPSPAAPDAATVVVESYVVDVPPGNTPEDTRVFIDTIVKCNLQSLATTAEKLAAV

SEQ ID NO: 171 - protein, 218 aa, Artificial Sequence
  synthetic ZmPYLo homologous to AtPYR1 A160I
MPCLQASSPGSMPYQHHGRGVGCAAEAGAAVGASAGTGTRCGAHDGEVPAEAARHHEHAAPGPGRCCSAVVQRVAAPAEAVWSVVRRFDQPQAYKRFVRSCALLAGDGGVGTLREVRVVSGLPAASSRERLEVLDDESHVLSFRVVGGEHRLQNYLSVTTVHPSPAAPDAATVVVESYVVDVPPGNTPEDTRVFIDTIVKCNLQSLATTAEKLALAAV

SEQ ID NO: 172 - protein, 212 aa, Artificial Sequence
  synthetic ZmPYLi homologous to AtPYR1 A160I
MDQQGAGGDAEVPAGLGLTAAEYEQLRSTVDAHHRYAVGEGQCSSLLAQRIHAPPEAVWAVVRRFDCPQVYKHFIRSCALRPDPEAGDALCPGRLREVSVISGLPASTSTERLDLLDDAARVFGFSITGGEHRLRNYRSVTTVSELADPAICTVVLESYVVDVPDGNTEDDTRLFIDTVIRLNLQKLKSVAEANAAEAAATTNSVLLPRPAE

SEQ ID NO: 173 - protein, 205 aa, Artificial Sequence
  synthetic ZmPYLk homologous to AtPYR1 A160I
MDQQGAGGDVEVPAGLGLTAAEYEQLRPTVDAHHRYAVGEGQCSSLLAQRIHAPPAAVWAIVRRFDCPQVYKHFIRSCAVRPDPDAGDALRPGRLREVCVISGLPASTSTERLDHLDDAARVFGFSITGGEHRLRNYRSVTTVSELAGPGICTVVLESYAVDVPDGNTEDDTRLFIDTVIRLNLQKLKSVAEASTSSSAPPPPSE

SEQ ID NO: 174 - protein, 188 aa, Artificial Sequence
  synthetic ZmPYLj homologous to AtPYR1 A160I
MEPHMESALRQGLSEAEQRELEGVVRAHHTFPGRAPGTCTSLVTQRVDAPLAAVWPIVRGFGSPQRYKHFIKSCDLKAGDGATVGSVREVTVVSGLPASTSTERLEILDDHRHILSFRVVGGDHRLRNYRSVTSVTEFQPGPYCVVLESYVVDVPDGNTEEDTRMFIDTVVKLNLQKLAAIATSSSAN

SEQ ID NO: 175 - protein, 214 aa, Artificial Sequence
  synthetic ZmPYLd homologous to AtPYR1 A160I
MVVEMDGGVGVAAAGGGGAQTPAPPPPRRWRLADERCDLRAMETDYVRRFHRHEPRDHQCSSAVAKHIKAPVHLVWSLVRRFDQPQLFKPFVSRCEMKGNIEIGSVREVNVKSGLPATRSTERLELLDDDERILSVRFVGGDHRLQNYSSILSVTEFQPGPYCVVLESYVVDVPDGNTEEDTRMFIDTVVKLNLQKLAAIATSSSANQTEPLDR

SEQ ID NO: 176 - protein, 209 aa, Artificial Sequence
  synthetic ZmPYLf homologous to AtPYR1 A160I
MVMVEMDGGVGGGGGGGQTPAPRRWRLADERCDLRAMETDYVRRFHRHEPREHQCSSAVAKHIKAPVHLVWSLVRRFDQPQLFKPFVSRCEMKGNIEIGSVREVNVKSGLPATRSTERLELLDDNEHILSVRFVGGDHRLQNYSSILSVTEFQPGPYCVVLESYVVDVPDGNTEEDTRMFIDTVVKLNLQKLAAIATSSSANQTEPLDR

SEQ ID NO: 177 - protein, 197 aa, Artificial Sequence
  synthetic ZmPYLe homologous to AtPYR1 A160I
MVGLVGGSTARAEHVVANAGGEAEYVRRMHRHAPTEHQCTSTLVKHIKAPVHLVWELVRRFDQPQRYKPFVRNCVVRGDQLEVGSLRDVNVKTGLPATTSTERLEQLDDDLHILGVKFVGGDHRLQNYSSIITVHPESIDGRPGTLVIESFVVDVPDGNTKDETCYFIEAVIKCNLNSLAEVSEQLAVESPTSLIDQ

SEQ ID NO: 178 - protein, 197 aa, Artificial Sequence
  synthetic ZmPYLg homologous to AtPYR1 A160I
MVGLVGGSTARAEHVVANAGGETEYVRRLHRHAPAEHQCTSTLVKHIKAPVHLVWELVRSFDQPQRYKPFVRNCVVRGDQLEVGSLRDVNVKTGLPATTSTERLEQLDDDLHILGVKFVGGDHRLQNYSSIITVHPESIDGRPGTLVIESFVVDVPDGNTKDETCYFIEAVIKCNLKSLAEVSEQLAVESPTSPIDQ

SEQ ID NO: 179 - protein, 212 aa, Artificial Sequence
  synthetic ZmPYLi homologous to AtPYR1 A160V
MDQQGAGGDAEVPAGLGLTAAEYEQLRSTVDAHHRYAVGEGQCSSLLAQRIHAPPEAVWAVVRRFDCPQVYKHFIRSCALRPDPEAGDALCPGRLREVSVISGLPASTSTERLDLLDDAARVFGFSITGGEHRLRNYRSVTTVSELADPAICTVVLESYVVDVPDGNTEDDTRLFADTVIRLNLQKLKSVAEANAAEAAATTNSVLLPRPAE

SEQ ID NO: 180 - protein, 205 aa, Artificial Sequence; identical to SEQ ID NO: 91
  synthetic ZmPYLk homologous to AtPYR1 A160V

SEQ ID NO: 181 - protein, 188 aa, Artificial Sequence; identical to SEQ ID NO: 90
  synthetic ZmPYLj homologous to AtPYR1 A160V

SEQ ID NO: 182 - protein, 233 aa, Artificial Sequence
  synthetic ZmPYLc homologous to AtPYR1 E141C
MRERNSSIDQEHQRGSSSRSTMPFAASRTSQQQHSRVATNGRAVAVCAGHAGVPDEVARHHEHAVAAGQCCAAMVQSIAAPVDAVWSLVRRFDQPQRYKRFIRSCHLVDGDGAEVGSVRELLLVSGLPAESSRERLEIRDDERRVISFRVLGGDHRLANYRSVTTVHEAAPSQDGRPLTMVVCSYVVDVPPGNTVEETRIFVDTIVRCNLQSLEGTVIRQLEIAAMPHDDNQN

SEQ ID NO: 183 - protein, 213 aa, Artificial Sequence
  synthetic ZmPYLl homologous to AtPYR1 E141C
MPYAATRTSPQQHSRVASNGRAVAACAGHAGVPDEVARHHEHAVAAGQCCSVMVQSIAAPADAVWSLVRRFDQPQGYKRFIRSCHLVDGDGVEVGSVRELLVVSGLPAENSRERLEIRDDERRVISFRILGGDHRLANYRSVTTVHEAASEGGPLTMVVCSYVVDVPPGNTVEETRIFVDTIVRCNLQSLEDTVIRQQAMAAPAAPHNDHNHS

SEQ ID NO: 184 - protein, 200 aa, Artificial Sequence
  synthetic ZmPYLa homologous to AtPYR1 E141C
MPYTAPRPSPQQHSRVLSGGGAKAASHGASCAAVPAEVARHHEHAARAGQCCSAVVQAIAAPVGAVWSVVRRFDRPQAYKHFIRSCRLVGGGDVAVGSVREVRVVSGLPATSSRERLEILDDERRVLSFRVVGGEHRLANYRSVTTVHEAGAGAGTGTVVVCSYVVDVPHGNTADETRVFVDTIVRCNLQSLARTAERLA

SEQ ID NO: 185 - protein, 220 aa, Artificial Sequence
  synthetic ZmPYLb homologous to AtPYR1 E141C
MPCIQASSPGGMPHQHGRGRVLGGGVGCAAEVAAAVAASAGGMRCGAHDGEVPAEAARHHEHAAAGPGRCCSAVVQHVAAPAAAVWSVVRRFDQPQVYKRFVRSCALLAGDGGVGTLREVRVVSGLPAASSRERLEVLDDESHVLSFRVVGGEHRLRNYLSVTTVHPSPAAPDAATVVVCSYVVDVPPGNTPEDTRVFVDTIVKCNLQSLATTAEKLAAV

SEQ ID NO: 186 - protein, 218 aa, Artificial Sequence
  synthetic ZmPYLo homologous to AtPYR1 E141C
MPCLQASSPGSMPYQHHGRGVGCAAEAGAAVGASAGTGTRCGAHDGEVPAEAARHHEHAAPGPGRCCSAVVQRVAAPAEAVWSVVRRFDQPQAYKRFVRSCALLAGDGGVGTLREVRVVSGLPAASSRERLEVLDDESHVLSFRVVGGEHRLQNYLSVTTVHPSPAAPDAATVVVCSYVVDVPPGNTPEDTRVFVDTIVKCNLQSLATTAEKLALAAV

SEQ ID NO: 187 - protein, 212 aa, Artificial Sequence
  synthetic ZmPYLi homologous to AtPYR1 E141C
MDQQGAGGDAEVPAGLGLTAAEYEQLRSTVDAHHRYAVGEGQCSSLLAQRIHAPPEAVWAVVRRFDCPQVYKHFIRSCALRPDPEAGDALCPGRLREVSVISGLPASTSTERLDLLDDAARVFGFSITGGEHRLRNYRSVTTVSELADPAICTVVLCSYVVDVPDGNTEDDTRLFADTVIRLNLQKLKSVAEANAAEAAATTNSVLLPRPAE

SEQ ID NO: 188 - protein, 205 aa, Artificial Sequence
  synthetic ZmPYLk homologous to AtPYR1 E141C
MDQQGAGGDVEVPAGLGLTAAEYEQLRPTVDAHHRYAVGEGQCSSLLAQRIHAPPAAVWAIVRRFDCPQVYKHFIRSCAVRPDPDAGDALRPGRLREVCVISGLPASTSTERLDHLDDAARVFGFSITGGEHRLRNYRSVTTVSELAGPGICTVVLCSYAVDVPDGNTEDDTRLFADTVIRLNLQKLKSVAEASTSSSAPPPPSE

SEQ ID NO: 189 - protein, 188 aa, Artificial Sequence
  synthetic ZmPYLj homologous to AtPYR1 E141C
MEPHMESALRQGLSEAEQRELEGVVRAHHTFPGRAPGTCTSLVTQRVDAPLAAVWPIVRGFGSPQRYKHFIKSCDLKAGDGATVGSVREVTVVSGLPASTSTERLEILDDHRHILSFRVVGGDHRLRNYRSVTSVTEFQPGPYCVVLCSYVVDVPDGNTEEDTRMFTDTVVKLNLQKLAAIATSSSAN

SEQ ID NO: 190 - protein, 214 aa, Artificial Sequence
  synthetic ZmPYLd homologous to AtPYR1 E141C
MVVEMDGGVGVAAAGGGGAQTPAPPPPRRWRLADERCDLRAMETDYVRRFHRHEPRDHQCSSAVAKHIKAPVHLVWSLVRRFDQPQLFKPFVSRCEMKGNIEIGSVREVNVKSGLPATRSTERLELLDDDERILSVRFVGGDHRLQNYSSILSVTEFQPGPYCVVLCSYVVDVPDGNTEEDTRMFTDTVVKLNLQKLAAIATSSSANQTEPLDR

SEQ ID NO: 191 - protein, 209 aa, Artificial Sequence
  synthetic ZmPYLf homologous to AtPYR1 E141C
MVMVEMDGGVGGGGGGGQTPAPRRWRLADERCDLRAMETDYVRRFHRHEPREHQCSSAVAKHIKAPVHLVWSLVRRFDQPQLFKPFVSRCEMKGNIEIGSVREVNVKSGLPATRSTERLELLDDNEHILSVRFVGGDHRLQNYSSILSVTEFQPGPYCVVLCSYVVDVPDGNTEEDTRMFTDTVVKLNLQKLAAIATSSSANQTEPLDR

SEQ ID NO: 192 - protein, 197 aa, Artificial Sequence
  synthetic ZmPYLe homologous to AtPYR1 E141C
MVGLVGGSTARAEHVVANAGGEAEYVRRMHRHAPTEHQCTSTLVKHIKAPVHLVWELVRRFDQPQRYKPFVRNCVVRGDQLEVGSLRDVNVKTGLPATTSTERLEQLDDDLHILGVKFVGGDHRLQNYSSIITVHPESIDGRPGTLVICSFVVDVPDGNTKDETCYFVEAVIKCNLNSLAEVSEQLAVESPTSLIDQ

SEQ ID NO: 193 - protein, 197 aa, Artificial Sequence
  synthetic ZmPYLg homologous to AtPYR1 E141C
MVGLVGGSTARAEHVVANAGGETEYVRRLHRHAPAEHQCTSTLVKHIKAPVHLVWELVRSFDQPQRYKPFVRNCVVRGDQLEVGSLRDVNVKTGLPATTSTERLEQLDDDLHILGVKFVGGDHRLQNYSSIITVHPESIDGRPGTLVICSFVVDVPDGNTKDETCYFVEAVIKCNLKSLAEVSEQLAVESPTSPIDQ

SEQ ID NO: 194 - protein, 233 aa, Artificial Sequence
  synthetic ZmPYLc homologous to AtPYR1 E141I
MRERNSSIDQEHQRGSSSRSTMPFAASRTSQQQHSRVATNGRAVAVCAGHAGVPDEVARHHEHAVAAGQCCAAMVQSIAAPVDAVWSLVRRFDQPQRYKRFIRSCHLVDGDGAEVGSVRELLLVSGLPAESSRERLEIRDDERRVISFRVLGGDHRLANYRSVTTVHEAAPSQDGRPLTMVVISYVVDVPPGNTVEETRIFVDTIVRCNLQSLEGTVIRQLEIAAMPHDDNQN

SEQ ID NO: 195 - protein, 213 aa, Artificial Sequence
  synthetic ZmPYLl homologous to AtPYR1 E141I
MPYAATRTSPQQHSRVASNGRAVAACAGHAGVPDEVARHHEHAVAAGQCCSVMVQSIAAPADAVWSLVRRFDQPQGYKRFIRSCHLVDGDGVEVGSVRELLVVSGLPAENSRERLEIRDDERRVISFRILGGDHRLANYRSVTTVHEAASEGGPLTMVVISYVVDVPPGNTVEETRIFVDTIVRCNLQSLEDTVIRQQAMAAPAAPHNDHNHS

SEQ ID NO: 196 - protein, 200 aa, Artificial Sequence
  synthetic ZmPYLa homologous to AtPYR1 E141I
MPYTAPRPSPQQHSRVLSGGGAKAASHGASCAAVPAEVARHHEHAARAGQCCSAVVQAIAAPVGAVWSVVRRFDRPQAYKHFIRSCRLVGGGDVAVGSVREVRVVSGLPATSSRERLEILDDERRVLSFRVVGGEHRLANYRSVTTVHEAGAGAGTGTVVVISYVVDVPHGNTADETRVFVDTIVRCNLQSLARTAERLA

SEQ ID NO: 197 - protein, 220 aa, Artificial Sequence
  synthetic ZmPYLb homologous to AtPYR1 E141I
MPCIQASSPGGMPHQHGRGRVLGGGVGCAAEVAAAVAASAGGMRCGAHDGEVPAEAARHHEHAAAGPGRCCSAVVQHVAAPAAAVWSVVRRFDQPQVYKRFVRSCALLAGDGGVGTLREVRVVSGLPAASSRERLEVLDDESHVLSFRVVGGEHRLRNYLSVTTVHPSPAAPDAATVVVISYVVDVPPGNTPEDTRVFVDTIVKCNLQSLATTAEKLAAV

SEQ ID NO: 198 - protein, 218 aa, Artificial Sequence
  synthetic ZmPYLo homologous to AtPYR1 E141I
MPCLQASSPGSMPYQHHGRGVGCAAEAGAAVGASAGTGTRCGAHDGEVPAEAARHHEHAAPGPGRCCSAVVQRVAAPAEAVWSVVRRFDQPQAYKRFVRSCALLAGDGGVGTLREVRVVSGLPAASSRERLEVLDDESHVLSFRVVGGEHRLQNYLSVTTVHPSPAAPDAATVVVISYVVDVPPGNTPEDTRVFVDTIVKCNLQSLATTAEKLALAAV

SEQ ID NO: 199 - protein, 212 aa, Artificial Sequence
  synthetic ZmPYLi homologous to AtPYR1 E141I
MDQQGAGGDAEVPAGLGLTAAEYEQLRSTVDAHHRYAVGEGQCSSLLAQRIHAPPEAVWAVVRRFDCPQVYKHFIRSCALRPDPEAGDALCPGRLREVSVISGLPASTSTERLDLLDDAARVFGFSITGGEHRLRNYRSVTTVSELADPAICTVVLISYVVDVPDGNTEDDTRLFADTVIRLNLQKLKSVAEANAAEAAATTNSVLLPRPAE

SEQ ID NO: 200 - protein, 205 aa, Artificial Sequence
  synthetic ZmPYLk homologous to AtPYR1 E141I
MDQQGAGGDVEVPAGLGLTAAEYEQLRPTVDAHHRYAVGEGQCSSLLAQRIHAPPAAVWAIVRRFDCPQVYKHFIRSCAVRPDPDAGDALRPGRLREVCVISGLPASTSTERLDHLDDAARVFGFSITGGEHRLRNYRSVTTVSELAGPGICTVVLISYAVDVPDGNTEDDTRLFADTVIRLNLQKLKSVAEASTSSSAPPPPSE

SEQ ID NO: 201 - protein, 188 aa, Artificial Sequence
  synthetic ZmPYLj homologous to AtPYR1 E141I
MEPHMESALRQGLSEAEQRELEGVVRAHHTFPGRAPGTCTSLVTQRVDAPLAAVWPIVRGFGSPQRYKHFIKSCDLKAGDGATVGSVREVTVVSGLPASTSTERLEILDDHRHILSFRVVGGDHRLRNYRSVTSVTEFQPGPYCVVLISYVVDVPDGNTEEDTRMFTDTVVKLNLQKLAAIATSSSAN

SEQ ID NO: 202 - protein, 214 aa, Artificial Sequence
  synthetic ZmPYLd homologous to AtPYR1 E141I
MVVEMDGGVGVAAAGGGGAQTPAPPPPRRWRLADERCDLRAMETDYVRRFHRHEPRDHQCSSAVAKHIKAPVHLVWSLVRRFDQPQLFKPFVSRCEMKGNIEIGSVREVNVKSGLPATRSTERLELLDDDERILSVRFVGGDHRLQNYSSILSVTEFQPGPYCVVLISYVVDVPDGNTEEDTRMFTDTVVKLNLQKLAAIATSSSANQTEPLDR

SEQ ID NO: 203 - protein, 209 aa, Artificial Sequence
  synthetic ZmPYLf homologous to AtPYR1 E141I
MVMVEMDGGVGGGGGGGQTPAPRRWRLADERCDLRAMETDYVRRFHRHEPREHQCSSAVAKHIKAPVHLVWSLVRRFDQPQLFKPFVSRCEMKGNIEIGSVREVNVKSGLPATRSTERLELLDDNEHILSVRFVGGDHRLQNYSSILSVTEFQPGPYCVVLISYVVDVPDGNTEEDTRMFTDTVVKLNLQKLAAIATSSSANQTEPLDR

SEQ ID NO: 204 - protein, 197 aa, Artificial Sequence
  synthetic ZmPYLe homologous to AtPYR1 E141I
MVGLVGGSTARAEHVVANAGGEAEYVRRMHRHAPTEHQCTSTLVKHIKAPVHLVWELVRRFDQPQRYKPFVRNCVVRGDQLEVGSLRDVNVKTGLPATTSTERLEQLDDDLHILGVKFVGGDHRLQNYSSIITVHPESIDGRPGTLVIISFVVDVPDGNTKDETCYFVEAVIKCNLNSLAEVSEQLAVESPTSLIDQ

SEQ ID NO: 205 - protein, 197 aa, Artificial Sequence
  synthetic ZmPYLg homologous to AtPYR1 E141I
MVGLVGGSTARAEHVVANAGGETEYVRRLHRHAPAEHQCTSTLVKHIKAPVHLVWELVRSFDQPQRYKPFVRNCVVRGDQLEVGSLRDVNVKTGLPATTSTERLEQLDDDLHILGVKFVGGDHRLQNYSSIITVHPESIDGRPGTLVIISFVVDVPDGNTKDETCYFVEAVIKCNLKSLAEVSEQLAVESPTSPIDQ

SEQ ID NO: 206 - protein, 233 aa, Artificial Sequence
  synthetic ZmPYLc homologous to AtPYR1 E141L
MRERNSSIDQEHQRGSSSRSTMPFAASRTSQQQHSRVATNGRAVAVCAGHAGVPDEVARHHEHAVAAGQCCAAMVQSIAAPVDAVWSLVRRFDQPQRYKRFIRSCHLVDGDGAEVGSVRELLLVSGLPAESSRERLEIRDDERRVISFRVLGGDHRLANYRSVTTVHEAAPSQDGRPLTMVVLSYVVDVPPGNTVEETRIFVDTIVRCNLQSLEGTVIRQLEIAAMPHDDNQN

SEQ ID NO: 207 - protein, 213 aa, Artificial Sequence
  synthetic ZmPYLl homologous to AtPYR1 E141L
MPYAATRTSPQQHSRVASNGRAVAACAGHAGVPDEVARHHEHAVAAGQCCSVMVQSIAAPADAVWSLVRRFDQPQGYKRFIRSCHLVDGDGVEVGSVRELLVVSGLPAENSRERLEIRDDERRVISFRILGGDHRLANYRSVTTVHEAASEGGPLTMVVLSYVVDVPPGNTVEETRIFVDTIVRCNLQSLEDTVIRQQAMAAPAAPHNDHNHS

SEQ ID NO: 208 - protein, 200 aa, Artificial Sequence
  synthetic ZmPYLa homologous to AtPYR1 E141L
MPYTAPRPSPQQHSRVLSGGGAKAASHGASCAAVPAEVARHHEHAARAGQCCSAVVQAIAAPVGAVWSVVRRFDRPQAYKHFIRSCRLVGGGDVAVGSVREVRVVSGLPATSSRERLEILDDERRVLSFRVVGGEHRLANYRSVTTVHEAGAGAGTGTVVVLSYVVDVPHGNTADETRVFVDTIVRCNLQSLARTAERLA

SEQ ID NO: 209 - protein, 220 aa, Artificial Sequence
  synthetic ZmPYLb homologous to AtPYR1 E141L
MPCIQASSPGGMPHQHGRGRVLGGGVGCAAEVAAAVAASAGGMRCGAHDGEVPAEAARHHEHAAAGPGRCCSAVVQHVAAPAAAVWSVVRRFDQPQVYKRFVRSCALLAGDGGVGTLREVRVVSGLPAASSRERLEVLDDESHVLSFRVVGGEHRLRNYLSVTTVHPSPAAPDAATVVVLSYVVDVPPGNTPEDTRVFVDTIVKCNLQSLATTAEKLAAV

SEQ ID NO: 210 - protein, 218 aa, Artificial Sequence
  synthetic ZmPYLo homologous to AtPYR1 E141L
MPCLQASSPGSMPYQHHGRGVGCAAEAGAAVGASAGTGTRCGAHDGEVPAEAARHHEHAAPGPGRCCSAVVQRVAAPAEAVWSVVRRFDQPQAYKRFVRSCALLAGDGGVGTLREVRVVSGLPAASSRERLEVLDDESHVLSFRVVGGEHRLQNYLSVTTVHPSPAAPDAATVVVLSYVVDVPPGNTPEDTRVFVDTIVKCNLQSLATTAEKLALAAV

SEQ ID NO: 211 - protein, 212 aa, Artificial Sequence
  synthetic ZmPYLi homologous to AtPYR1 E141L
MDQQGAGGDAEVPAGLGLTAAEYEQLRSTVDAHHRYAVGEGQCSSLLAQRIHAPPEAVWAVVRRFDCPQVYKHFIRSCALRPDPEAGDALCPGRLREVSVISGLPASTSTERLDLLDDAARVFGFSITGGEHRLRNYRSVTTVSELADPAICTVVLLSYVVDVPDGNTEDDTRLFADTVIRLNLQKLKSVAEANAAEAAATTNSVLLPRPAE

SEQ ID NO: 212 - protein, 205 aa, Artificial Sequence
  synthetic ZmPYLk homologous to AtPYR1 E141L
MDQQGAGGDVEVPAGLGLTAAEYEQLRPTVDAHHRYAVGEGQCSSLLAQRIHAPPAAVWAIVRRFDCPQVYKHFIRSCAVRPDPDAGDALRPGRLREVCVISGLPASTSTERLDHLDDAARVFGFSITGGEHRLRNYRSVTTVSELAGPGICTVVLLSYAVDVPDGNTEDDTRLFADTVIRLNLQKLKSVAEASTSSSAPPPPSE

SEQ ID NO: 213 - protein, 188 aa, Artificial Sequence
  synthetic ZmPYLj homologous to AtPYR1 E141L
MEPHMESALRQGLSEAEQRELEGVVRAHHTFPGRAPGTCTSLVTQRVDAPLAAVWPIVRGFGSPQRYKHFIKSCDLKAGDGATVGSVREVTVVSGLPASTSTERLEILDDHRHILSFRVVGGDHRLRNYRSVTSVTEFQPGPYCVVLLSYVVDVPDGNTEEDTRMFTDTVVKLNLQKLAAIATSSSAN

SEQ ID NO: 214 - protein, 214 aa, Artificial Sequence
  synthetic ZmPYLd homologous to AtPYR1 E141L
MVVEMDGGVGVAAAGGGGAQTPAPPPPRRWRLADERCDLRAMETDYVRRFHRHEPRDHQCSSAVAKHIKAPVHLVWSLVRRFDQPQLFKPFVSRCEMKGNIEIGSVREVNVKSGLPATRSTERLELLDDDERILSVRFVGGDHRLQNYSSILSVTEFQPGPYCVVLLSYVVDVPDGNTEEDTRMFTDTVVKLNLQKLAAIATSSSANQTEPLDR

SEQ ID NO: 215 - protein, 209 aa, Artificial Sequence
  synthetic ZmPYLf homologous to AtPYR1 E141L
MVMVEMDGGVGGGGGGGQTPAPRRWRLADERCDLRAMETDYVRRFHRHEPREHQCSSAVAKHIKAPVHLVWSLVRRFDQPQLFKPFVSRCEMKGNIEIGSVREVNVKSGLPATRSTERLELLDDNEHILSVRFVGGDHRLQNYSSILSVTEFQPGPYCVVLLSYVVDVPDGNTEEDTRMFTDTVVKLNLQKLAAIATSSSANQTEPLDR

SEQ ID NO: 216 - protein, 197 aa, Artificial Sequence
  synthetic ZmPYLe homologous to AtPYR1 E141L
MVGLVGGSTARAEHVVANAGGEAEYVRRMHRHAPTEHQCTSTLVKHIKAPVHLVWELVRRFDQPQRYKPFVRNCVVRGDQLEVGSLRDVNVKTGLPATTSTERLEQLDDDLHILGVKFVGGDHRLQNYSSIITVHPESIDGRPGTLVILSFVVDVPDGNTKDETCYFVEAVIKCNLNSLAEVSEQLAVESPTSLIDQ

SEQ ID NO: 217 - protein, 197 aa, Artificial Sequence
  synthetic ZmPYLg homologous to AtPYR1 E141L
MVGLVGGSTARAEHVVANAGGETEYVRRLHRHAPAEHQCTSTLVKHIKAPVHLVWELVRSFDQPQRYKPFVRNCVVRGDQLEVGSLRDVNVKTGLPATTSTERLEQLDDDLHILGVKFVGGDHRLQNYSSIITVHPESIDGRPGTLVILSFVVDVPDGNTKDETCYFVEAVIKCNLKSLAEVSEQLAVESPTSPIDQ

SEQ ID NO: 218 - protein, 233 aa, Artificial Sequence
  synthetic ZmPYLc homologous to AtPYR1 E141M
MRERNSSIDQEHQRGSSSRSTMPFAASRTSQQQHSRVATNGRAVAVCAGHAGVPDEVARHHEHAVAAGQCCAAMVQSIAAPVDAVWSLVRRFDQPQRYKRFIRSCHLVDGDGAEVGSVRELLLVSGLPAESSRERLEIRDDERRVISFRVLGGDHRLANYRSVTTVHEAAPSQDGRPLTMVVMSYVVDVPPGNTVEETRIFVDTIVRCNLQSLEGTVIRQLEIAAMPHDDNQN

SEQ ID NO: 219 - protein, 213 aa, Artificial Sequence
  synthetic ZmPYLl homologous to AtPYR1 E141M
MPYAATRTSPQQHSRVASNGRAVAACAGHAGVPDEVARHHEHAVAAGQCCSVMVQSIAAPADAVWSLVRRFDQPQGYKRFIRSCHLVDGDGVEVGSVRELLVVSGLPAENSRERLEIRDDERRVISFRILGGDHRLANYRSVTTVHEAASEGGPLTMVVMSYVVDVPPGNTVEETRIFVDTIVRCNLQSLEDTVIRQQAMAAPAAPHNDHNHS

SEQ ID NO: 220 - protein, 200 aa, Artificial Sequence
  synthetic ZmPYLa homologous to AtPYR1 E141M
MPYTAPRPSPQQHSRVLSGGGAKAASHGASCAAVPAEVARHHEHAARAGQCCSAVVQAIAAPVGAVWSVVRRFDRPQAYKHFIRSCRLVGGGDVAVGSVREVRVVSGLPATSSRERLEILDDERRVLSFRVVGGEHRLANYRSVTTVHEAGAGAGTGTVVVMSYVVDVPHGNTADETRVFVDTIVRCNLQSLARTAERLA

SEQ ID NO: 221 - protein, 220 aa, Artificial Sequence
  synthetic ZmPYLb homologous to AtPYR1 E141M
MPCIQASSPGGMPHQHGRGRVLGGGVGCAAEVAAAVAASAGGMRCGAHDGEVPAEAARHHEHAAAGPGRCCSAVVQHVAAPAAAVWSVVRRFDQPQVYKRFVRSCALLAGDGGVGTLREVRVVSGLPAASSRERLEVLDDESHVLSFRVVGGEHRLRNYLSVTTVHPSPAAPDAATVVVMSYVVDVPPGNTPEDTRVFVDTIVKCNLQSLATTAEKLAAV

SEQ ID NO: 222 - protein, 218 aa, Artificial Sequence
  synthetic ZmPYLo homologous to AtPYR1 E141M
MPCLQASSPGSMPYQHHGRGVGCAAEAGAAVGASAGTGTRCGAHDGEVPAEAARHHEHAAPGPGRCCSAVVQRVAAPAEAVWSVVRRFDQPQAYKRFVRSCALLAGDGGVGTLREVRVVSGLPAASSRERLEVLDDESHVLSFRVVGGEHRLQNYLSVTTVHPSPAAPDAATVVVMSYVVDVPPGNTPEDTRVFVDTIVKCNLQSLATTAEKLALAAV

SEQ ID NO: 223 - protein, 212 aa, Artificial Sequence
  synthetic ZmPYLi homologous to AtPYR1 E141M
MDQQGAGGDAEVPAGLGLTAAEYEQLRSTVDAHHRYAVGEGQCSSLLAQRIHAPPEAVWAVVRRFDCPQVYKHFIRSCALRPDPEAGDALCPGRLREVSVISGLPASTSTERLDLLDDAARVFGFSITGGEHRLRNYRSVTTVSELADPAICTVVLMSYVVDVPDGNTEDDTRLFADTVIRLNLQKLKSVAEANAAEAAATTNSVLLPRPAE

SEQ ID NO: 224 - protein, 205 aa, Artificial Sequence
  synthetic ZmPYLk homologous to AtPYR1 E141M
MDQQGAGGDVEVPAGLGLTAAEYEQLRPTVDAHHRYAVGEGQCSSLLAQRIHAPPAAVWAIVRRFDCPQVYKHFIRSCAVRPDPDAGDALRPGRLREVCVISGLPASTSTERLDHLDDAARVFGFSITGGEHRLRNYRSVTTVSELAGPGICTVVLMSYAVDVPDGNTEDDTRLFADTVIRLNLQKLKSVAEASTSSSAPPPPSE

SEQ ID NO: 225 - protein, 188 aa, Artificial Sequence
  synthetic ZmPYLj homologous to AtPYR1 E141M
MEPHMESALRQGLSEAEQRELEGVVRAHHTFPGRAPGTCTSLVTQRVDAPLAAVWPIVRGFGSPQRYKHFIKSCDLKAGDGATVGSVREVTVVSGLPASTSTERLEILDDHRHILSFRVVGGDHRLRNYRSVTSVTEFQPGPYCVVLMSYVVDVPDGNTEEDTRMFTDTVVKLNLQKLAAIATSSSAN

SEQ ID NO: 226 - protein, 214 aa, Artificial Sequence
  synthetic ZmPYLd homologous to AtPYR1 E141M
MVVEMDGGVGVAAAGGGGAQTPAPPPPRRWRLADERCDLRAMETDYVRRFHRHEPRDHQCSSAVAKHIKAPVHLVWSLVRRFDQPQLFKPFVSRCEMKGNIEIGSVREVNVKSGLPATRSTERLELLDDDERILSVRFVGGDHRLQNYSSILSVTEFQPGPYCVVLMSYVVDVPDGNTEEDTRMFTDTVVKLNLQKLAAIATSSSANQTEPLDR

SEQ ID NO: 227 - protein, 209 aa, Artificial Sequence
  synthetic ZmPYLf homologous to AtPYR1 E141M
MVMVEMDGGVGGGGGGGQTPAPRRWRLADERCDLRAMETDYVRRFHRHEPREHQCSSAVAKHIKAPVHLVWSLVRRFDQPQLFKPFVSRCEMKGNIEIGSVREVNVKSGLPATRSTERLELLDDNEHILSVRFVGGDHRLQNYSSILSVTEFQPGPYCVVLMSYVVDVPDGNTEEDTRMFTDTVVKLNLQKLAAIATSSSANQTEPLDR

SEQ ID NO: 228 - protein, 197 aa, Artificial Sequence
  synthetic ZmPYLe homologous to AtPYR1 E141M
MVGLVGGSTARAEHVVANAGGEAEYVRRMHRHAPTEHQCTSTLVKHIKAPVHLVWELVRRFDQPQRYKPFVRNCVVRGDQLEVGSLRDVNVKTGLPATTSTERLEQLDDDLHILGVKFVGGDHRLQNYSSIITVHPESIDGRPGTLVIMSFVVDVPDGNTKDETCYFVEAVIKCNLNSLAEVSEQLAVESPTSLIDQ

SEQ ID NO: 229 - protein, 197 aa, Artificial Sequence
  synthetic ZmPYLg homologous to AtPYR1 E141M
MVGLVGGSTARAEHVVANAGGETEYVRRLHRHAPAEHQCTSTLVKHIKAPVHLVWELVRSFDQPQRYKPFVRNCVVRGDQLEVGSLRDVNVKTGLPATTSTERLEQLDDDLHILGVKFVGGDHRLQNYSSIITVHPESIDGRPGTLVIMSFVVDVPDGNTKDETCYFVEAVIKCNLKSLAEVSEQLAVESPTSPIDQ

SEQ ID NO: 230 - protein, 233 aa, Artificial Sequence
  synthetic ZmPYLc homologous to AtPYR1 E141N
MRERNSSIDQEHQRGSSSRSTMPFAASRTSQQQHSRVATNGRAVAVCAGHAGVPDEVARHHEHAVAAGQCCAAMVQSIAAPVDAVWSLVRRFDQPQRYKRFIRSCHLVDGDGAEVGSVRELLLVSGLPAESSRERLEIRDDERRVISFRVLGGDHRLANYRSVTTVHEAAPSQDGRPLTMVVNSYVVDVPPGNTVEETRIFVDTIVRCNLQSLEGTVIRQLEIAAMPHDDNQN

SEQ ID NO: 231 - protein, 213 aa, Artificial Sequence
  synthetic ZmPYLl homologous to AtPYR1 E141N
MPYAATRTSPQQHSRVASNGRAVAACAGHAGVPDEVARHHEHAVAAGQCCSVMVQSIAAPADAVWSLVRRFDQPQGYKRFIRSCHLVDGDGVEVGSVRELLVVSGLPAENSRERLEIRDDERRVISFRILGGDHRLANYRSVTTVHEAASEGGPLTMVVNSYVVDVPPGNTVEETRIFVDTIVRCNLQSLEDTVIRQQAMAAPAAPHNDHNHS

SEQ ID NO: 232 - protein, 200 aa, Artificial Sequence
  synthetic ZmPYLa homologous to AtPYR1 E141N
MPYTAPRPSPQQHSRVLSGGGAKAASHGASCAAVPAEVARHHEHAARAGQCCSAVVQAIAAPVGAVWSVVRRFDRPQAYKHFIRSCRLVGGGDVAVGSVREVRVVSGLPATSSRERLEILDDERRVLSFRVVGGEHRLANYRSVTTVHEAGAGAGTGTVVVNSYVVDVPHGNTADETRVFVDTIVRCNLQSLARTAERLA

SEQ ID NO: 233 - protein, 220 aa, Artificial Sequence
  synthetic ZmPYLb homologous to AtPYR1 E141N
MPCIQASSPGGMPHQHGRGRVLGGGVGCAAEVAAAVAASAGGMRCGAHDGEVPAEAARHHEHAAAGPGRCCSAVVQHVAAPAAAVWSVVRRFDQPQVYKRFVRSCALLAGDGGVGTLREVRVVSGLPAASSRERLEVLDDESHVLSFRVVGGEHRLRNYLSVTTVHPSPAAPDAATVVVNSYVVDVPPGNTPEDTRVFVDTIVKCNLQSLATTAEKLAAV

SEQ ID NO: 234 - protein, 218 aa, Artificial Sequence
  synthetic ZmPYLo homologous to AtPYR1 E141N
MPCLQASSPGSMPYQHHGRGVGCAAEAGAAVGASAGTGTRCGAHDGEVPAEAARHHEHAAPGPGRCCSAVVQRVAAPAEAVWSVVRRFDQPQAYKRFVRSCALLAGDGGVGTLREVRVVSGLPAASSRERLEVLDDESHVLSFRVVGGEHRLQNYLSVTTVHPSPAAPDAATVVVNSYVVDVPPGNTPEDTRVFVDTIVKCNLQSLATTAEKLALAAV

SEQ ID NO: 235 - protein, 212 aa, Artificial Sequence
  synthetic ZmPYLi homologous to AtPYR1 E141N
MDQQGAGGDAEVPAGLGLTAAEYEQLRSTVDAHHRYAVGEGQCSSLLAQRIHAPPEAVWAVVRRFDCPQVYKHFIRSCALRPDPEAGDALCPGRLREVSVISGLPASTSTERLDLLDDAARVFGFSITGGEHRLRNYRSVTTVSELADPAICTVVLNSYVVDVPDGNTEDDTRLFADTVIRLNLQKLKSVAEANAAEAAATTNSVLLPRPAE

SEQ ID NO: 236 - protein, 205 aa, Artificial Sequence
  synthetic ZmPYLk homologous to AtPYR1 E141N
MDQQGAGGDVEVPAGLGLTAAEYEQLRPTVDAHHRYAVGEGQCSSLLAQRIHAPPAAVWAIVRRFDCPQVYKHFIRSCAVRPDPDAGDALRPGRLREVCVISGLPASTSTERLDHLDDAARVFGFSITGGEHRLRNYRSVTTVSELAGPGICTVVLNSYAVDVPDGNTEDDTRLFADTVIRLNLQKLKSVAEASTSSSAPPPPSE

SEQ ID NO: 237 - protein, 188 aa, Artificial Sequence
  synthetic ZmPYLj homologous to AtPYR1 E141N
MEPHMESALRQGLSEAEQRELEGVVRAHHTFPGRAPGTCTSLVTQRVDAPLAAVWPIVRGFGSPQRYKHFIKSCDLKAGDGATVGSVREVTVVSGLPASTSTERLEILDDHRHILSFRVVGGDHRLRNYRSVTSVTEFQPGPYCVVLNSYVVDVPDGNTEEDTRMFTDTVVKLNLQKLAAIATSSSAN

SEQ ID NO: 238 - protein, 214 aa, Artificial Sequence
  synthetic ZmPYLd homologous to AtPYR1 E141N
MVVEMDGGVGVAAAGGGGAQTPAPPPPRRWRLADERCDLRAMETDYVRRFHRHEPRDHQCSSAVAKHIKAPVHLVWSLVRRFDQPQLFKPFVSRCEMKGNIEIGSVREVNVKSGLPATRSTERLELLDDDERILSVRFVGGDHRLQNYSSILSVTEFQPGPYCVVLNSYVVDVPDGNTEEDTRMFTDTVVKLNLQKLAAIATSSSANQTEPLDR

SEQ ID NO: 239 - protein, 209 aa, Artificial Sequence
  synthetic ZmPYLf homologous to AtPYR1 E141N
MVMVEMDGGVGGGGGGGQTPAPRRWRLADERCDLRAMETDYVRRFHRHEPREHQCSSAVAKHIKAPVHLVWSLVRRFDQPQLFKPFVSRCEMKGNIEIGSVREVNVKSGLPATRSTERLELLDDNEHILSVRFVGGDHRLQNYSSILSVTEFQPGPYCVVLNSYVVDVPDGNTEEDTRMFTDTVVKLNLQKLAAIATSSSANQTEPLDR

SEQ ID NO: 240 - protein, 197 aa, Artificial Sequence
  synthetic ZmPYLe homologous to AtPYR1 E141N
MVGLVGGSTARAEHVVANAGGEAEYVRRMHRHAPTEHQCTSTLVKHIKAPVHLVWELVRRFDQPQRYKPFVRNCVVRGDQLEVGSLRDVNVKTGLPATTSTERLEQLDDDLHILGVKFVGGDHRLQNYSSIITVHPESIDGRPGTLVINSFVVDVPDGNTKDETCYFVEAVIKCNLNSLAEVSEQLAVESPTSLIDQ

SEQ ID NO: 241 - protein, 197 aa, Artificial Sequence
  synthetic ZmPYLg homologous to AtPYR1 E141N
MVGLVGGSTARAEHVVANAGGETEYVRRLHRHAPAEHQCTSTLVKHIKAPVHLVWELVRSFDQPQRYKPFVRNCVVRGDQLEVGSLRDVNVKTGLPATTSTERLEQLDDDLHILGVKFVGGDHRLQNYSSIITVHPESIDGRPGTLVINSFVVDVPDGNTKDETCYFVEAVIKCNLKSLAEVSEQLAVESPTSPIDQ

SEQ ID NO: 242 - protein, 233 aa, Artificial Sequence
  synthetic ZmPYLc homologous to AtPYR1 E141T
MRERNSSIDQEHQRGSSSRSTMPFAASRTSQQQHSRVATNGRAVAVCAGHAGVPDEVARHHEHAVAAGQCCAAMVQSIAAPVDAVWSLVRRFDQPQRYKRFIRSCHLVDGDGAEVGSVRELLLVSGLPAESSRERLEIRDDERRVISFRVLGGDHRLANYRSVTTVHEAAPSQDGRPLTMVVTSYVVDVPPGNTVEETRIFVDTIVRCNLQSLEGTVIRQLEIAAMPHDDNQN

SEQ ID NO: 243 - protein, 213 aa, Artificial Sequence
  synthetic ZmPYLl homologous to AtPYR1 E141T
MPYAATRTSPQQHSRVASNGRAVAACAGHAGVPDEVARHHEHAVAAGQCCSVMVQSIAAPADAVWSLVRRFDQPQGYKRFIRSCHLVDGDGVEVGSVRELLVVSGLPAENSRERLEIRDDERRVISFRILGGDHRLANYRSVTTVHEAASEGGPLTMVVTSYVVDVPPGNTVEETRIFVDTIVRCNLQSLEDTVIRQQAMAAPAAPHNDHNHS

SEQ ID NO: 244 - protein, 200 aa, Artificial Sequence
  synthetic ZmPYLa homologous to AtPYR1 E141T
MPYTAPRPSPQQHSRVLSGGGAKAASHGASCAAVPAEVARHHEHAARAGQCCSAVVQAIAAPVGAVWSVVRRFDRPQAYKHFIRSCRLVGGGDVAVGSVREVRVVSGLPATSSRERLEILDDERRVLSFRVVGGEHRLANYRSVTTVHEAGAGAGTGTVVVTSYVVDVPHGNTADETRVFVDTIVRCNLQSLARTAERLA

SEQ ID NO: 245 - protein, 220 aa, Artificial Sequence
  synthetic ZmPYLb homologous to AtPYR1 E141T
MPCIQASSPGGMPHQHGRGRVLGGGVGCAAEVAAAVAASAGGMRCGAHDGEVPAEAARHHEHAAAGPGRCCSAVVQHVAAPAAAVWSVVRRFDQPQVYKRFVRSCALLAGDGGVGTLREVRVVSGLPAASSRERLEVLDDESHVLSFRVVGGEHRLRNYLSVTTVHPSPAAPDAATVVVTSYVVDVPPGNTPEDTRVFVDTIVKCNLQSLATTAEKLAAV

SEQ ID NO: 246 - protein, 218 aa, Artificial Sequence
  synthetic ZmPYLo homologous to AtPYR1 E141T
MPCLQASSPGSMPYQHHGRGVGCAAEAGAAVGASAGTGTRCGAHDGEVPAEAARHHEHAAPGPGRCCSAVVQRVAAPAEAVWSVVRRFDQPQAYKRFVRSCALLAGDGGVGTLREVRVVSGLPAASSRERLEVLDDESHVLSFRVVGGEHRLQNYLSVTTVHPSPAAPDAATVVVTSYVVDVPPGNTPEDTRVFVDTIVKCNLQSLATTAEKLALAAV

SEQ ID NO: 247 - protein, 212 aa, Artificial Sequence
  synthetic ZmPYLi homologous to AtPYR1 E141T
MDQQGAGGDAEVPAGLGLTAAEYEQLRSTVDAHHRYAVGEGQCSSLLAQRIHAPPEAVWAVVRRFDCPQVYKHFIRSCALRPDPEAGDALCPGRLREVSVISGLPASTSTERLDLLDDAARVFGFSITGGEHRLRNYRSVTTVSELADPAICTVVLTSYVVDVPDGNTEDDTRLFADTVIRLNLQKLKSVAEANAAEAAATTNSVLLPRPAE

SEQ ID NO: 248 - protein, 205 aa, Artificial Sequence
  synthetic ZmPYLk homologous to AtPYR1 E141T
MDQQGAGGDVEVPAGLGLTAAEYEQLRPTVDAHHRYAVGEGQCSSLLAQRIHAPPAAVWAIVRRFDCPQVYKHFIRSCAVRPDPDAGDALRPGRLREVCVISGLPASTSTERLDHLDDAARVFGFSITGGEHRLRNYRSVTTVSELAGPGICTVVLTSYAVDVPDGNTEDDTRLFADTVIRLNLQKLKSVAEASTSSSAPPPPSE

SEQ ID NO: 249 - protein, 188 aa, Artificial Sequence
  synthetic ZmPYLj homologous to AtPYR1 E141T
MEPHMESALRQGLSEAEQRELEGVVRAHHTFPGRAPGTCTSLVTQRVDAPLAAVWPIVRGFGSPQRYKHFIKSCDLKAGDGATVGSVREVTVVSGLPASTSTERLEILDDHRHILSFRVVGGDHRLRNYRSVTSVTEFQPGPYCVVLTSYVVDVPDGNTEEDTRMFTDTVVKLNLQKLAAIATSSSAN

SEQ ID NO: 250 - protein, 214 aa, Artificial Sequence
  synthetic ZmPYLd homologous to AtPYR1 E141T
MVVEMDGGVGVAAAGGGGAQTPAPPPPRRWRLADERCDLRAMETDYVRRFHRHEPRDHQCSSAVAKHIKAPVHLVWSLVRRFDQPQLFKPFVSRCEMKGNIEIGSVREVNVKSGLPATRSTERLELLDDDERILSVRFVGGDHRLQNYSSILSVTEFQPGPYCVVLTSYVVDVPDGNTEEDTRMFTDTVVKLNLQKLAAIATSSSANQTEPLDR

SEQ ID NO: 251 - protein, 209 aa, Artificial Sequence
  synthetic ZmPYLf homologous to AtPYR1 E141T
MVMVEMDGGVGGGGGGGQTPAPRRWRLADERCDLRAMETDYVRRFHRHEPREHQCSSAVAKHIKAPVHLVWSLVRRFDQPQLFKPFVSRCEMKGNIEIGSVREVNVKSGLPATRSTERLELLDDNEHILSVRFVGGDHRLQNYSSILSVTEFQPGPYCVVLTSYVVDVPDGNTEEDTRMFTDTVVKLNLQKLAAIATSSSANQTEPLDR

SEQ ID NO: 252 - protein, 197 aa, Artificial Sequence
  synthetic ZmPYLe homologous to AtPYR1 E141T
MVGLVGGSTARAEHVVANAGGEAEYVRRMHRHAPTEHQCTSTLVKHIKAPVHLVWELVRRFDQPQRYKPFVRNCVVRGDQLEVGSLRDVNVKTGLPATTSTERLEQLDDDLHILGVKFVGGDHRLQNYSSIITVHPESIDGRPGTLVITSFVVDVPDGNTKDETCYFVEAVIKCNLNSLAEVSEQLAVESPTSLIDQ

SEQ ID NO: 253 - protein, 197 aa, Artificial Sequence
  synthetic ZmPYLg homologous to AtPYR1 E141T
MVGLVGGSTARAEHVVANAGGETEYVRRLHRHAPAEHQCTSTLVKHIKAPVHLVWELVRSFDQPQRYKPFVRNCVVRGDQLEVGSLRDVNVKTGLPATTSTERLEQLDDDLHILGVKFVGGDHRLQNYSSIITVHPESIDGRPGTLVITSFVVDVPDGNTKDETCYFVEAVIKCNLKSLAEVSEQLAVESPTSPIDQ

SEQ ID NO: 254 - protein, 233 aa, Artificial Sequence
  synthetic ZmPYLc homologous to AtPYR1 E141V
MRERNSSIDQEHQRGSSSRSTMPFAASRTSQQQHSRVATNGRAVAVCAGHAGVPDEVARHHEHAVAAGQCCAAMVQSIAAPVDAVWSLVRRFDQPQRYKRFIRSCHLVDGDGAEVGSVRELLLVSGLPAESSRERLEIRDDERRVISFRVLGGDHRLANYRSVTTVHEAAPSQDGRPLTMVVVSYVVDVPPGNTVEETRIFVDTIVRCNLQSLEGTVIRQLEIAAMPHDDNQN

SEQ ID NO: 255 - protein, 213 aa, Artificial Sequence
  synthetic ZmPYLl homologous to AtPYR1 E141V
MPYAATRTSPQQHSRVASNGRAVAACAGHAGVPDEVARHHEHAVAAGQCCSVMVQSIAAPADAVWSLVRRFDQPQGYKRFIRSCHLVDGDGVEVGSVRELLVVSGLPAENSRERLEIRDDERRVISFRILGGDHRLANYRSVTTVHEAASEGGPLTMVVVSYVVDVPPGNTVEETRIFVDTIVRCNLQSLEDTVIRQQAMAAPAAPHNDHNHS

SEQ ID NO: 256 - protein, 200 aa, Artificial Sequence
  synthetic ZmPYLa homologous to AtPYR1 E141V
MPYTAPRPSPQQHSRVLSGGGAKAASHGASCAAVPAEVARHHEHAARAGQCCSAVVQAIAAPVGAVWSVVRRFDRPQAYKHFIRSCRLVGGGDVAVGSVREVRVVSGLPATSSRERLEILDDERRVLSFRVVGGEHRLANYRSVTTVHEAGAGAGTGTVVVVSYVVDVPHGNTADETRVFVDTIVRCNLQSLARTAERLA

SEQ ID NO: 257 - protein, 220 aa, Artificial Sequence
  synthetic ZmPYLb homologous to AtPYR1 E141V
MPCIQASSPGGMPHQHGRGRVLGGGVGCAAEVAAAVAASAGGMRCGAHDGEVPAEAARHHEHAAAGPGRCCSAVVQHVAAPAAAVWSVVRRFDQPQVYKRFVRSCALLAGDGGVGTLREVRVVSGLPAASSRERLEVLDDESHVLSFRVVGGEHRLRNYLSVTTVHPSPAAPDAATVVVVSYVVDVPPGNTPEDTRVFVDTIVKCNLQSLATTAEKLAAV

SEQ ID NO: 258 - protein, 218 aa, Artificial Sequence
  synthetic ZmPYLo homologous to AtPYR1 E141V
MPCLQASSPGSMPYQHHGRGVGCAAEAGAAVGASAGTGTRCGAHDGEVPAEAARHHEHAAPGPGRCCSAVVQRVAAPAEAVWSVVRRFDQPQAYKRFVRSCALLAGDGGVGTLREVRVVSGLPAASSRERLEVLDDESHVLSFRVVGGEHRLQNYLSVTTVHPSPAAPDAATVVVVSYVVDVPPGNTPEDTRVFVDTIVKCNLQSLATTAEKLALAAV

SEQ ID NO: 259 - protein, 212 aa, Artificial Sequence
  synthetic ZmPYLi homologous to AtPYR1 E141V
MDQQGAGGDAEVPAGLGLTAAEYEQLRSTVDAHHRYAVGEGQCSSLLAQRIHAPPEAVWAVVRRFDCPQVYKHFIRSCALRPDPEAGDALCPGRLREVSVISGLPASTSTERLDLLDDAARVFGFSITGGEHRLRNYRSVTTVSELADPAICTVVLVSYVVDVPDGNTEDDTRLFADTVIRLNLQKLKSVAEANAAEAAATTNSVLLPRPAE

SEQ ID NO: 260 - protein, 205 aa, Artificial Sequence
  synthetic ZmPYLk homologous to AtPYR1 E141V
MDQQGAGGDVEVPAGLGLTAAEYEQLRPTVDAHHRYAVGEGQCSSLLAQRIHAPPAAVWAIVRRFDCPQVYKHFIRSCAVRPDPDAGDALRPGRLREVCVISGLPASTSTERLDHLDDAARVFGFSITGGEHRLRNYRSVTTVSELAGPGICTVVLVSYAVDVPDGNTEDDTRLFADTVIRLNLQKLKSVAEASTSSSAPPPPSE

SEQ ID NO: 261 - protein, 188 aa, Artificial Sequence
  synthetic ZmPYLj homologous to AtPYR1 E141V
MEPHMESALRQGLSEAEQRELEGVVRAHHTFPGRAPGTCTSLVTQRVDAPLAAVWPIVRGFGSPQRYKHFIKSCDLKAGDGATVGSVREVTVVSGLPASTSTERLEILDDHRHILSFRVVGGDHRLRNYRSVTSVTEFQPGPYCVVLVSYVVDVPDGNTEEDTRMFTDTVVKLNLQKLAAIATSSSAN

SEQ ID NO: 262 - protein, 214 aa, Artificial Sequence
  synthetic ZmPYLd homologous to AtPYR1 E141V
MVVEMDGGVGVAAAGGGGAQTPAPPPPRRWRLADERCDLRAMETDYVRRFHRHEPRDHQCSSAVAKHIKAPVHLVWSLVRRFDQPQLFKPFVSRCEMKGNIEIGSVREVNVKSGLPATRSTERLELLDDDERILSVRFVGGDHRLQNYSSILSVTEFQPGPYCVVLVSYVVDVPDGNTEEDTRMFTDTVVKLNLQKLAAIATSSSANQTEPLDR

SEQ ID NO: 263 - protein, 209 aa, Artificial Sequence
  synthetic ZmPYLf homologous to AtPYR1 E141V
MVMVEMDGGVGGGGGGGQTPAPRRWRLADERCDLRAMETDYVRRFHRHEPREHQCSSAVAKHIKAPVHLVWSLVRRFDQPQLFKPFVSRCEMKGNIEIGSVREVNVKSGLPATRSTERLELLDDNEHILSVRFVGGDHRLQNYSSILSVTEFQPGPYCVVLVSYVVDVPDGNTEEDTRMFTDTVVKLNLQKLAAIATSSSANQTEPLDR

SEQ ID NO: 264 - protein, 197 aa, Artificial Sequence
  synthetic ZmPYLe homologous to AtPYR1 E141V
MVGLVGGSTARAEHVVANAGGEAEYVRRMHRHAPTEHQCTSTLVKHIKAPVHLVWELVRRFDQPQRYKPFVRNCVVRGDQLEVGSLRDVNVKTGLPATTSTERLEQLDDDLHILGVKFVGGDHRLQNYSSIITVHPESIDGRPGTLVIVSFVVDVPDGNTKDETCYFVEAVIKCNLNSLAEVSEQLAVESPTSLIDQ

SEQ ID NO: 265 - protein, 197 aa, Artificial Sequence
  synthetic ZmPYLg homologous to AtPYR1 E141V
MVGLVGGSTARAEHVVANAGGETEYVRRLHRHAPAEHQCTSTLVKHIKAPVHLVWELVRSFDQPQRYKPFVRNCVVRGDQLEVGSLRDVNVKTGLPATTSTERLEQLDDDLHILGVKFVGGDHRLQNYSSIITVHPESIDGRPGTLVIVSFVVDVPDGNTKDETCYFVEAVIKCNLKSLAEVSEQLAVESPTSPIDQ

SEQ ID NO: 266 - protein, 233 aa, Artificial Sequence
  synthetic ZmPYLc homologous to AtPYR1 E141W
MRERNSSIDQEHQRGSSSRSTMPFAASRTSQQQHSRVATNGRAVAVCAGHAGVPDEVARHHEHAVAAGQCCAAMVQSIAAPVDAVWSLVRRFDQPQRYKRFIRSCHLVDGDGAEVGSVRELLLVSGLPAESSRERLEIRDDERRVISFRVLGGDHRLANYRSVTTVHEAAPSQDGRPLTMVVWSYVVDVPPGNTVEETRIFVDTIVRCNLQSLEGTVIRQLEIAAMPHDDNQN

SEQ ID NO: 267 - protein, 213 aa, Artificial Sequence
  synthetic ZmPYLl homologous to AtPYR1 E141W
MPYAATRTSPQQHSRVASNGRAVAACAGHAGVPDEVARHHEHAVAAGQCCSVMVQSIAAPADAVWSLVRRFDQPQGYKRFIRSCHLVDGDGVEVGSVRELLVVSGLPAENSRERLEIRDDERRVISFRILGGDHRLANYRSVTTVHEAASEGGPLTMVVWSYVVDVPPGNTVEETRIFVDTIVRCNLQSLEDTVIRQQAMAAPAAPHNDHNHS

SEQ ID NO: 268 - protein, 200 aa, Artificial Sequence
  synthetic ZmPYLa homologous to AtPYR1 E141W
MPYTAPRPSPQQHSRVLSGGGAKAASHGASCAAVPAEVARHHEHAARAGQCCSAVVQAIAAPVGAVWSVVRRFDRPQAYKHFIRSCRLVGGGDVAVGSVREVRVVSGLPATSSRERLEILDDERRVLSFRVVGGEHRLANYRSVTTVHEAGAGAGTGTVVVWSYVVDVPHGNTADETRVFVDTIVRCNLQSLARTAERLA

SEQ ID NO: 269 - protein, 220 aa, Artificial Sequence
  synthetic ZmPYLb homologous to AtPYR1 E141W
MPCIQASSPGGMPHQHGRGRVLGGGVGCAAEVAAAVAASAGGMRCGAHDGEVPAEAARHHEHAAAGPGRCCSAVVQHVAAPAAAVWSVVRRFDQPQVYKRFVRSCALLAGDGGVGTLREVRVVSGLPAASSRERLEVLDDESHVLSFRVVGGEHRLRNYLSVTTVHPSPAAPDAATVVVWSYVVDVPPGNTPEDTRVFVDTIVKCNLQSLATTAEKLAAV

SEQ ID NO: 270 - protein, 218 aa, Artificial Sequence
  synthetic ZmPYLo homologous to AtPYR1 E141W
MPCLQASSPGSMPYQHHGRGVGCAAEAGAAVGASAGTGTRCGAHDGEVPAEAARHHEHAAPGPGRCCSAVVQRVAAPAEAVWSVVRRFDQPQAYKRFVRSCALLAGDGGVGTLREVRVVSGLPAASSRERLEVLDDESHVLSFRVVGGEHRLQNYLSVTTVHPSPAAPDAATVVVWSYVVDVPPGNTPEDTRVFVDTIVKCNLQSLATTAEKLALAAV

SEQ ID NO: 271 - protein, 212 aa, Artificial Sequence
  synthetic ZmPYLi homologous to AtPYR1 E141W
MDQQGAGGDAEVPAGLGLTAAEYEQLRSTVDAHHRYAVGEGQCSSLLAQRIHAPPEAVWAVVRRFDCPQVYKHFIRSCALRPDPEAGDALCPGRLREVSVISGLPASTSTERLDLLDDAARVFGFSITGGEHRLRNYRSVTTVSELADPAICTVVLWSYVVDVPDGNTEDDTRLFADTVIRLNLQKLKSVAEANAAEAAATTNSVLLPRPAE

SEQ ID NO: 272 - protein, 205 aa, Artificial Sequence
  synthetic ZmPYLk homologous to AtPYR1 E141W
MDQQGAGGDVEVPAGLGLTAAEYEQLRPTVDAHHRYAVGEGQCSSLLAQRIHAPPAAVWAIVRRFDCPQVYKHFIRSCAVRPDPDAGDALRPGRLREVCVISGLPASTSTERLDHLDDAARVFGFSITGGEHRLRNYRSVTTVSELAGPGICTVVLWSYAVDVPDGNTEDDTRLFADTVIRLNLQKLKSVAEASTSSSAPPPPSE

SEQ ID NO: 273 - protein, 188 aa, Artificial Sequence
  synthetic ZmPYLj homologous to AtPYR1 E141W
MEPHMESALRQGLSEAEQRELEGVVRAHHTFPGRAPGTCTSLVTQRVDAPLAAVWPIVRGFGSPQRYKHFIKSCDLKAGDGATVGSVREVTVVSGLPASTSTERLEILDDHRHILSFRVVGGDHRLRNYRSVTSVTEFQPGPYCVVLWSYVVDVPDGNTEEDTRMFTDTVVKLNLQKLAAIATSSSAN

SEQ ID NO: 274 - protein, 214 aa, Artificial Sequence
  synthetic ZmPYLd homologous to AtPYR1 E141W
MVVEMDGGVGVAAAGGGGAQTPAPPPPRRWRLADERCDLRAMETDYVRRFHRHEPRDHQCSSAVAKHIKAPVHLVWSLVRRFDQPQLFKPFVSRCEMKGNIEIGSVREVNVKSGLPATRSTERLELLDDDERILSVRFVGGDHRLQNYSSILSVTEFQPGPYCVVLWSYVVDVPDGNTEEDTRMFTDTVVKLNLQKLAAIATSSSANQTEPLDR

SEQ ID NO: 275 - protein, 209 aa, Artificial Sequence
  synthetic ZmPYLf homologous to AtPYR1 E141W
MVMVEMDGGVGGGGGGGQTPAPRRWRLADERCDLRAMETDYVRRFHRHEPREHQCSSAVAKHIKAPVHLVWSLVRRFDQPQLFKPFVSRCEMKGNIEIGSVREVNVKSGLPATRSTERLELLDDNEHILSVRFVGGDHRLQNYSSILSVTEFQPGPYCVVLWSYVVDVPDGNTEEDTRMFTDTVVKLNLQKLAAIATSSSANQTEPLDR

SEQ ID NO: 276 - protein, 197 aa, Artificial Sequence
  synthetic ZmPYLe homologous to AtPYR1 E141W
MVGLVGGSTARAEHVVANAGGEAEYVRRMHRHAPTEHQCTSTLVKHIKAPVHLVWELVRRFDQPQRYKPFVRNCVVRGDQLEVGSLRDVNVKTGLPATTSTERLEQLDDDLHILGVKFVGGDHRLQNYSSIITVHPESIDGRPGTLVIWSFVVDVPDGNTKDETCYFVEAVIKCNLNSLAEVSEQLAVESPTSLIDQ

SEQ ID NO: 277 - protein, 197 aa, Artificial Sequence
  synthetic ZmPYLg homologous to AtPYR1 E141W
MVGLVGGSTARAEHVVANAGGETEYVRRLHRHAPAEHQCTSTLVKHIKAPVHLVWELVRSFDQPQRYKPFVRNCVVRGDQLEVGSLRDVNVKTGLPATTSTERLEQLDDDLHILGVKFVGGDHRLQNYSSIITVHPESIDGRPGTLVIWSFVVDVPDGNTKDETCYFVEAVIKCNLKSLAEVSEQLAVESPTSPIDQ

SEQ ID NO: 278 - protein, 233 aa, Artificial Sequence
  synthetic ZmPYLc homologous to AtPYR1 E141Y
MRERNSSIDQEHQRGSSSRSTMPFAASRTSQQQHSRVATNGRAVAVCAGHAGVPDEVARHHEHAVAAGQCCAAMVQSIAAPVDAVWSLVRRFDQPQRYKRFIRSCHLVDGDGAEVGSVRELLLVSGLPAESSRERLEIRDDERRVISFRVLGGDHRLANYRSVTTVHEAAPSQDGRPLTMVVYSYVVDVPPGNTVEETRIFVDTIVRCNLQSLEGTVIRQLEIAAMPHDDNQN

SEQ ID NO: 279 - protein, 213 aa, Artificial Sequence
  synthetic ZmPYLl homologous to AtPYR1 E141Y
MPYAATRTSPQQHSRVASNGRAVAACAGHAGVPDEVARHHEHAVAAGQCCSVMVQSIAAPADAVWSLVRRFDQPQGYKRFIRSCHLVDGDGVEVGSVRELLVVSGLPAENSRERLEIRDDERRVISFRILGGDHRLANYRSVTTVHEAASEGGPLTMVVYSYVVDVPPGNTVEETRIFVDTIVRCNLQSLEDTVIRQQAMAAPAAPHNDHNHS

SEQ ID NO: 280 - protein, 200 aa, Artificial Sequence
  synthetic ZmPYLa homologous to AtPYR1 E141Y
MPYTAPRPSPQQHSRVLSGGGAKAASHGASCAAVPAEVARHHEHAARAGQCCSAVVQAIAAPVGAVWSVVRRFDRPQAYKHFIRSCRLVGGGDVAVGSVREVRVVSGLPATSSRERLEILDDERRVLSFRVVGGEHRLANYRSVTTVHEAGAGAGTGTVVVYSYVVDVPHGNTADETRVFVDTIVRCNLQSLARTAERLA

SEQ ID NO: 281 - protein, 220 aa, Artificial Sequence
  synthetic ZmPYLb homologous to AtPYR1 E141Y
MPCIQASSPGGMPHQHGRGRVLGGGVGCAAEVAAAVAASAGGMRCGAHDGEVPAEAARHHEHAAAGPGRCCSAVVQHVAAPAAAVWSVVRRFDQPQVYKRFVRSCALLAGDGGVGTLREVRVVSGLPAASSRERLEVLDDESHVLSFRVVGGEHRLRNYLSVTTVHPSPAAPDAATVVVYSYVVDVPPGNTPEDTRVFVDTIVKCNLQSLATTAEKLAAV

SEQ ID NO: 282 - protein, 218 aa, Artificial Sequence
  synthetic ZmPYLo homologous to AtPYR1 E141Y
MPCLQASSPGSMPYQHHGRGVGCAAEAGAAVGASAGTGTRCGAHDGEVPAEAARHHEHAAPGPGRCCSAVVQRVAAPAEAVWSVVRRFDQPQAYKRFVRSCALLAGDGGVGTLREVRVVSGLPAASSRERLEVLDDESHVLSFRVVGGEHRLQNYLSVTTVHPSPAAPDAATVVVYSYVVDVPPGNTPEDTRVFVDTIVKCNLQSLATTAEKLALAAV

SEQ ID NO: 283 - protein, 212 aa, Artificial Sequence
  synthetic ZmPYLi homologous to AtPYR1 E141Y
MDQQGAGGDAEVPAGLGLTAAEYEQLRSTVDAHHRYAVGEGQCSSLLAQRIHAPPEAVWAVVRRFDCPQVYKHFIRSCALRPDPEAGDALCPGRLREVSVISGLPASTSTERLDLLDDAARVFGFSITGGEHRLRNYRSVTTVSELADPAICTVVLYSYVVDVPDGNTEDDTRLFADTVIRLNLQKLKSVAEANAAEAAATTNSVLLPRPAE

SEQ ID NO: 284 - protein, 205 aa, Artificial Sequence
  synthetic ZmPYLk homologous to AtPYR1 E141Y
MDQQGAGGDVEVPAGLGLTAAEYEQLRPTVDAHHRYAVGEGQCSSLLAQRIHAPPAAVWAIVRRFDCPQVYKHFIRSCAVRPDPDAGDALRPGRLREVCVISGLPASTSTERLDHLDDAARVFGFSITGGEHRLRNYRSVTTVSELAGPGICTVVLYSYAVDVPDGNTEDDTRLFADTVIRLNLQKLKSVAEASTSSSAPPPPSE

SEQ ID NO: 285 - protein, 188 aa, Artificial Sequence
  synthetic ZmPYLj homologous to AtPYR1 E141Y
MEPHMESALRQGLSEAEQRELEGVVRAHHTFPGRAPGTCTSLVTQRVDAPLAAVWPIVRGFGSPQRYKHFIKSCDLKAGDGATVGSVREVTVVSGLPASTSTERLEILDDHRHILSFRVVGGDHRLRNYRSVTSVTEFQPGPYCVVLYSYVVDVPDGNTEEDTRMFTDTVVKLNLQKLAAIATSSSAN

SEQ ID NO: 286 - protein, 214 aa, Artificial Sequence
  synthetic ZmPYLd homologous to AtPYR1 E141Y
MVVEMDGGVGVAAAGGGGAQTPAPPPPRRWRLADERCDLRAMETDYVRRFHRHEPRDHQCSSAVAKHIKAPVHLVWSLVRRFDQPQLFKPFVSRCEMKGNIEIGSVREVNVKSGLPATRSTERLELLDDDERILSVRFVGGDHRLQNYSSILSVTEFQPGPYCVVLYSYVVDVPDGNTEEDTRMFTDTVVKLNLQKLAAIATSSSANQTEPLDR

SEQ ID NO: 287 - protein, 209 aa, Artificial Sequence
  synthetic ZmPYLf homologous to AtPYR1 E141Y
MVMVEMDGGVGGGGGGGQTPAPRRWRLADERCDLRAMETDYVRRFHRHEPREHQCSSAVAKHIKAPVHLVWSLVRRFDQPQLFKPFVSRCEMKGNIEIGSVREVNVKSGLPATRSTERLELLDDNEHILSVRFVGGDHRLQNYSSILSVTEFQPGPYCVVLYSYVVDVPDGNTEEDTRMFTDTVVKLNLQKLAAIATSSSANQTEPLDR

SEQ ID NO: 288 - protein, 197 aa, Artificial Sequence
  synthetic ZmPYLe homologous to AtPYR1 E141Y
MVGLVGGSTARAEHVVANAGGEAEYVRRMHRHAPTEHQCTSTLVKHIKAPVHLVWELVRRFDQPQRYKPFVRNCVVRGDQLEVGSLRDVNVKTGLPATTSTERLEQLDDDLHILGVKFVGGDHRLQNYSSIITVHPESIDGRPGTLVIYSFVVDVPDGNTKDETCYFVEAVIKCNLNSLAEVSEQLAVESPTSLIDQ

SEQ ID NO: 289 - protein, 197 aa, Artificial Sequence
  synthetic ZmPYLg homologous to AtPYR1 E141Y
MVGLVGGSTARAEHVVANAGGETEYVRRLHRHAPAEHQCTSTLVKHIKAPVHLVWELVRSFDQPQRYKPFVRNCVVRGDQLEVGSLRDVNVKTGLPATTSTERLEQLDDDLHILGVKFVGGDHRLQNYSSIITVHPESIDGRPGTLVIYSFVVDVPDGNTKDETCYFVEAVIKCNLKSLAEVSEQLAVESPTSPIDQ

SEQ ID NO: 290 - protein, 233 aa, Artificial Sequence
  synthetic ZmPYLc homologous to AtPYR1 F61L
MRERNSSIDQEHQRGSSSRSTMPFAASRTSQQQHSRVATNGRAVAVCAGHAGVPDEVARHHEHAVAAGQCCAAMVQSIAAPVDAVWSLVRRFDQPQRYKRLIRSCHLVDGDGAEVGSVRELLLVSGLPAESSRERLEIRDDERRVISFRVLGGDHRLANYRSVTTVHEAAPSQDGRPLTMVVESYVVDVPPGNTVEETRIFVDTIVRCNLQSLEGTVIRQLEIAAMPHDDNQN

SEQ ID NO: 291 - protein, 213 aa, Artificial Sequence
  synthetic ZmPYLl homologous to AtPYR1 F61L
MPYAATRTSPQQHSRVASNGRAVAACAGHAGVPDEVARHHEHAVAAGQCCSVMVQSIAAPADAVWSLVRRFDQPQGYKRLIRSCHLVDGDGVEVGSVRELLVVSGLPAENSRERLEIRDDERRVISFRILGGDHRLANYRSVTTVHEAASEGGPLTMVVESYVVDVPPGNTVEETRIFVDTIVRCNLQSLEDTVIRQQAMAAPAAPHNDHNHS

SEQ ID NO: 292 - protein, 200 aa, Artificial Sequence
  synthetic ZmPYLa homologous to AtPYR1 F61L
MPYTAPRPSPQQHSRVLSGGGAKAASHGASCAAVPAEVARHHEHAARAGQCCSAVVQAIAAPVGAVWSVVRRFDRPQAYKHLIRSCRLVGGGDVAVGSVREVRVVSGLPATSSRERLEILDDERRVLSFRVVGGEHRLANYRSVTTVHEAGAGAGTGTVVVESYVVDVPHGNTADETRVFVDTIVRCNLQSLARTAERLA

SEQ ID NO: 293 - protein, 220 aa, Artificial Sequence
  synthetic ZmPYLb homologous to AtPYR1 F61L
MPCIQASSPGGMPHQHGRGRVLGGGVGCAAEVAAAVAASAGGMRCGAHDGEVPAEAARHHEHAAAGPGRCCSAVVQHVAAPAAAVWSVVRRFDQPQVYKRLVRSCALLAGDGGVGTLREVRVVSGLPAASSRERLEVLDDESHVLSFRVVGGEHRLRNYLSVTTVHPSPAAPDAATVVVESYVVDVPPGNTPEDTRVFVDTIVKCNLQSLATTAEKLAAV

SEQ ID NO: 294 - protein, 218 aa, Artificial Sequence
  synthetic ZmPYLo homologous to AtPYR1 F61L
MPCLQASSPGSMPYQHHGRGVGCAAEAGAAVGASAGTGTRCGAHDGEVPAEAARHHEHAAPGPGRCCSAVVQRVAAPAEAVWSVVRRFDQPQAYKRLVRSCALLAGDGGVGTLREVRVVSGLPAASSRERLEVLDDESHVLSFRVVGGEHRLQNYLSVTTVHPSPAAPDAATVVVESYVVDVPPGNTPEDTRVFVDTIVKCNLQSLATTAEKLALAAV

SEQ ID NO: 295 - protein, 212 aa, Artificial Sequence
  synthetic ZmPYLi homologous to AtPYR1 F61L
MDQQGAGGDAEVPAGLGLTAAEYEQLRSTVDAHHRYAVGEGQCSSLLAQRIHAPPEAVWAVVRRFDCPQVYKHLIRSCALRPDPEAGDALCPGRLREVSVISGLPASTSTERLDLLDDAARVFGFSITGGEHRLRNYRSVTTVSELADPAICTVVLESYVVDVPDGNTEDDTRLFADTVIRLNLQKLKSVAEANAAEAAATTNSVLLPRPAE

SEQ ID NO: 296 - protein, 205 aa, Artificial Sequence
  synthetic ZmPYLk homologous to AtPYR1 F61L
MDQQGAGGDVEVPAGLGLTAAEYEQLRPTVDAHHRYAVGEGQCSSLLAQRIHAPPAAVWAIVRRFDCPQVYKHLIRSCAVRPDPDAGDALRPGRLREVCVISGLPASTSTERLDHLDDAARVFGFSITGGEHRLRNYRSVTTVSELAGPGICTVVLESYAVDVPDGNTEDDTRLFADTVIRLNLQKLKSVAEASTSSSAPPPPSE

SEQ ID NO: 297 - protein, 188 aa, Artificial Sequence
  synthetic ZmPYLj homologous to AtPYR1 F61L
MEPHMESALRQGLSEAEQRELEGVVRAHHTFPGRAPGTCTSLVTQRVDAPLAAVWPIVRGFGSPQRYKHLIKSCDLKAGDGATVGSVREVTVVSGLPASTSTERLEILDDHRHILSFRVVGGDHRLRNYRSVTSVTEFQPGPYCVVLESYVVDVPDGNTEEDTRMFTDTVVKLNLQKLAAIATSSSAN

SEQ ID NO: 298 - protein, 214 aa, Artificial Sequence
  synthetic ZmPYLd homologous to AtPYR1 F61L
MVVEMDGGVGVAAAGGGGAQTPAPPPPRRWRLADERCDLRAMETDYVRRFHRHEPRDHQCSSAVAKHIKAPVHLVWSLVRRFDQPQLFKPLVSRCEMKGNIEIGSVREVNVKSGLPATRSTERLELLDDDERILSVRFVGGDHRLQNYSSILSVTEFQPGPYCVVLESYVVDVPDGNTEEDTRMFTDTVVKLNLQKLAAIATSSSANQTEPLDR

SEQ ID NO: 299 - protein, 209 aa, Artificial Sequence
  synthetic ZmPYLf homologous to AtPYR1 F61L
MVMVEMDGGVGGGGGGGQTPAPRRWRLADERCDLRAMETDYVRRFHRHEPREHQCSSAVAKHIKAPVHLVWSLVRRFDQPQLFKPLVSRCEMKGNIEIGSVREVNVKSGLPATRSTERLELLDDNEHILSVRFVGGDHRLQNYSSILSVTEFQPGPYCVVLESYVVDVPDGNTEEDTRMFTDTVVKLNLQKLAAIATSSSANQTEPLDR

SEQ ID NO: 300 - protein, 197 aa, Artificial Sequence
  synthetic ZmPYLe homologous to AtPYR1 F61L
MVGLVGGSTARAEHVVANAGGEAEYVRRMHRHAPTEHQCTSTLVKHIKAPVHLVWELVRRFDQPQRYKPLVRNCVVRGDQLEVGSLRDVNVKTGLPATTSTERLEQLDDDLHILGVKFVGGDHRLQNYSSIITVHPESIDGRPGTLVIESFVVDVPDGNTKDETCYFVEAVIKCNLNSLAEVSEQLAVESPTSLIDQ

SEQ ID NO: 301 - protein, 197 aa, Artificial Sequence
  synthetic ZmPYLg homologous to AtPYR1 F61L
MVGLVGGSTARAEHVVANAGGETEYVRRLHRHAPAEHQCTSTLVKHIKAPVHLVWELVRSFDQPQRYKPLVRNCVVRGDQLEVGSLRDVNVKTGLPATTSTERLEQLDDDLHILGVKFVGGDHRLQNYSSIITVHPESIDGRPGTLVIESFVVDVPDGNTKDETCYFVEAVIKCNLKSLAEVSEQLAVESPTSPIDQ

SEQ ID NO: 302 - protein, 233 aa, Artificial Sequence
  synthetic ZmPYLc homologous to AtPYR1 F61M
MRERNSSIDQEHQRGSSSRSTMPFAASRTSQQQHSRVATNGRAVAVCAGHAGVPDEVARHHEHAVAAGQCCAAMVQSIAAPVDAVWSLVRRFDQPQRYKRMIRSCHLVDGDGAEVGSVRELLLVSGLPAESSRERLEIRDDERRVISFRVLGGDHRLANYRSVTTVHEAAPSQDGRPLTMVVESYVVDVPPGNTVEETRIFVDTIVRCNLQSLEGTVIRQLEIAAMPHDDNQN

SEQ ID NO: 303 - protein, 213 aa, Artificial Sequence
  synthetic ZmPYLl homologous to AtPYR1 F61M
MPYAATRTSPQQHSRVASNGRAVAACAGHAGVPDEVARHHEHAVAAGQCCSVMVQSIAAPADAVWSLVRRFDQPQGYKRMIRSCHLVDGDGVEVGSVRELLVVSGLPAENSRERLEIRDDERRVISFRILGGDHRLANYRSVTTVHEAASEGGPLTMVVESYVVDVPPGNTVEETRIFVDTIVRCNLQSLEDTVIRQQAMAAPAAPHNDHNHS

SEQ ID NO: 304 - protein, 200 aa, Artificial Sequence
  synthetic ZmPYLa homologous to AtPYR1 F61M
MPYTAPRPSPQQHSRVLSGGGAKAASHGASCAAVPAEVARHHEHAARAGQCCSAVVQAIAAPVGAVWSVVRRFDRPQAYKHMIRSCRLVGGGDVAVGSVREVRVVSGLPATSSRERLEILDDERRVLSFRVVGGEHRLANYRSVTTVHEAGAGAGTGTVVVESYVVDVPHGNTADETRVFVDTIVRCNLQSLARTAERLA

SEQ ID NO: 305 - protein, 220 aa, Artificial Sequence
  synthetic ZmPYLb homologous to AtPYR1 F61M
MPCIQASSPGGMPHQHGRGRVLGGGVGCAAEVAAAVAASAGGMRCGAHDGEVPAEAARHHEHAAAGPGRCCSAVVQHVAAPAAAVWSVVRRFDQPQVYKRMVRSCALLAGDGGVGTLREVRVVSGLPAASSRERLEVLDDESHVLSFRVVGGEHRLRNYLSVTTVHPSPAAPDAATVVVESYVVDVPPGNTPEDTRVFVDTIVKCNLQSLATTAEKLAAV

SEQ ID NO: 306 - protein, 218 aa, Artificial Sequence
  synthetic ZmPYLo homologous to AtPYR1 F61M
MPCLQASSPGSMPYQHHGRGVGCAAEAGAAVGASAGTGTRCGAHDGEVPAEAARHHEHAAPGPGRCCSAVVQRVAAPAEAVWSVVRRFDQPQAYKRMVRSCALLAGDGGVGTLREVRVVSGLPAASSRERLEVLDDESHVLSFRVVGGEHRLQNYLSVTTVHPSPAAPDAATVVVESYVVDVPPGNTPEDTRVFVDTIVKCNLQSLATTAEKLALAAV

SEQ ID NO: 307 - protein, 212 aa, Artificial Sequence
  synthetic ZmPYLi homologous to AtPYR1 F61M
MDQQGAGGDAEVPAGLGLTAAEYEQLRSTVDAHHRYAVGEGQCSSLLAQRIHAPPEAVWAVVRRFDCPQVYKHMIRSCALRPDPEAGDALCPGRLREVSVISGLPASTSTERLDLLDDAARVFGFSITGGEHRLRNYRSVTTVSELADPAICTVVLESYVVDVPDGNTEDDTRLFADTVIRLNLQKLKSVAEANAAEAAATTNSVLLPRPAE

SEQ ID NO: 308 - protein, 205 aa, Artificial Sequence
  synthetic ZmPYLk homologous to AtPYR1 F61M
MDQQGAGGDVEVPAGLGLTAAEYEQLRPTVDAHHRYAVGEGQCSSLLAQRIHAPPAAVWAIVRRFDCPQVYKHMIRSCAVRPDPDAGDALRPGRLREVCVISGLPASTSTERLDHLDDAARVFGFSITGGEHRLRNYRSVTTVSELAGPGICTVVLESYAVDVPDGNTEDDTRLFADTVIRLNLQKLKSVAEASTSSSAPPPPSE

SEQ ID NO: 309 - protein, 188 aa, Artificial Sequence
  synthetic ZmPYLj homologous to AtPYR1 F61M
MEPHMESALRQGLSEAEQRELEGVVRAHHTFPGRAPGTCTSLVTQRVDAPLAAVWPIVRGFGSPQRYKHMIKSCDLKAGDGATVGSVREVTVVSGLPASTSTERLEILDDHRHILSFRVVGGDHRLRNYRSVTSVTEFQPGPYCVVLESYVVDVPDGNTEEDTRMFTDTVVKLNLQKLAAIATSSSAN

SEQ ID NO: 310 - protein, 214 aa, Artificial Sequence
  synthetic ZmPYLd homologous to AtPYR1 F61M
MVVEMDGGVGVAAAGGGGAQTPAPPPPRRWRLADERCDLRAMETDYVRRFHRHEPRDHQCSSAVAKHIKAPVHLVWSLVRRFDQPQLFKPMVSRCEMKGNIEIGSVREVNVKSGLPATRSTERLELLDDDERILSVRFVGGDHRLQNYSSILSVTEFQPGPYCVVLESYVVDVPDGNTEEDTRMFTDTVVKLNLQKLAAIATSSSANQTEPLDR

SEQ ID NO: 311 - protein, 209 aa, Artificial Sequence
  synthetic ZmPYLf homologous to AtPYR1 F61M
MVMVEMDGGVGGGGGGGQTPAPRRWRLADERCDLRAMETDYVRRFHRHEPREHQCSSAVAKHIKAPVHLVWSLVRRFDQPQLFKPMVSRCEMKGNIEIGSVREVNVKSGLPATRSTERLELLDDNEHILSVRFVGGDHRLQNYSSILSVTEFQPGPYCVVLESYVVDVPDGNTEEDTRMFTDTVVKLNLQKLAAIATSSSANQTEPLDR

SEQ ID NO: 312 - protein, 197 aa, Artificial Sequence
  synthetic ZmPYLe homologous to AtPYR1 F61M
MVGLVGGSTARAEHVVANAGGEAEYVRRMHRHAPTEHQCTSTLVKHIKAPVHLVWELVRRFDQPQRYKPMVRNCVVRGDQLEVGSLRDVNVKTGLPATTSTERLEQLDDDLHILGVKFVGGDHRLQNYSSIITVHPESIDGRPGTLVIESFVVDVPDGNTKDETCYFVEAVIKCNLNSLAEVSEQLAVESPTSLIDQ

SEQ ID NO: 313 - protein, 197 aa, Artificial Sequence
  synthetic ZmPYLg homologous to AtPYR1 F61M
MVGLVGGSTARAEHVVANAGGETEYVRRLHRHAPAEHQCTSTLVKHIKAPVHLVWELVRSFDQPQRYKPMVRNCVVRGDQLEVGSLRDVNVKTGLPATTSTERLEQLDDDLHILGVKFVGGDHRLQNYSSIITVHPESIDGRPGTLVIESFVVDVPDGNTKDETCYFVEAVIKCNLKSLAEVSEQLAVESPTSPIDQ

SEQ ID NO: 314 - protein, 233 aa, Artificial Sequence
  synthetic ZmPYLc homologous to AtPYR1 I110C
MRERNSSIDQEHQRGSSSRSTMPFAASRTSQQQHSRVATNGRAVAVCAGHAGVPDEVARHHEHAVAAGQCCAAMVQSIAAPVDAVWSLVRRFDQPQRYKRFIRSCHLVDGDGAEVGSVRELLLVSGLPAESSRERLEIRDDERRVISFRCLGGDHRLANYRSVTTVHEAAPSQDGRPLTMVVESYVVDVPPGNTVEETRIFVDTIVRCNLQSLEGTVIRQLEIAAMPHDDNQN

SEQ ID NO: 315 - protein, 213 aa, Artificial Sequence
  synthetic ZmPYLl homologous to AtPYR1 I110C
MPYAATRTSPQQHSRVASNGRAVAACAGHAGVPDEVARHHEHAVAAGQCCSVMVQSIAAPADAVWSLVRRFDQPQGYKRFIRSCHLVDGDGVEVGSVRELLVVSGLPAENSRERLEIRDDERRVISFRCLGGDHRLANYRSVTTVHEAASEGGPLTMVVESYVVDVPPGNTVEETRIFVDTIVRCNLQSLEDTVIRQQAMAAPAAPHNDHNHS

SEQ ID NO: 316 - protein, 200 aa, Artificial Sequence
  synthetic ZmPYLa homologous to AtPYR1 I110C
MPYTAPRPSPQQHSRVLSGGGAKAASHGASCAAVPAEVARHHEHAARAGQCCSAVVQAIAAPVGAVWSVVRRFDRPQAYKHFIRSCRLVGGGDVAVGSVREVRVVSGLPATSSRERLEILDDERRVLSFRCVGGEHRLANYRSVTTVHEAGAGAGTGTVVVESYVVDVPHGNTADETRVFVDTIVRCNLQSLARTAERLA

SEQ ID NO: 317 - protein, 220 aa, Artificial Sequence
  synthetic ZmPYLb homologous to AtPYR1 I110C
MPCIQASSPGGMPHQHGRGRVLGGGVGCAAEVAAAVAASAGGMRCGAHDGEVPAEAARHHEHAAAGPGRCCSAVVQHVAAPAAAVWSVVRRFDQPQVYKRFVRSCALLAGDGGVGTLREVRVVSGLPAASSRERLEVLDDESHVLSFRCVGGEHRLRNYLSVTTVHPSPAAPDAATVVVESYVVDVPPGNTPEDTRVFVDTIVKCNLQSLATTAEKLAAV

SEQ ID NO: 318 - protein, 218 aa, Artificial Sequence
  synthetic ZmPYLo homologous to AtPYR1 I110C
MPCLQASSPGSMPYQHHGRGVGCAAEAGAAVGASAGTGTRCGAHDGEVPAEAARHHEHAAPGPGRCCSAVVQRVAAPAEAVWSVVRRFDQPQAYKRFVRSCALLAGDGGVGTLREVRVVSGLPAASSRERLEVLDDESHVLSFRCVGGEHRLQNYLSVTTVHPSPAAPDAATVVVESYVVDVPPGNTPEDTRVFVDTIVKCNLQSLATTAEKLALAAV

SEQ ID NO: 319 - protein, 212 aa, Artificial Sequence
  synthetic ZmPYLi homologous to AtPYR1 I110C
MDQQGAGGDAEVPAGLGLTAAEYEQLRSTVDAHHRYAVGEGQCSSLLAQRIHAPPEAVWAVVRRFDCPQVYKHFIRSCALRPDPEAGDALCPGRLREVSVISGLPASTSTERLDLLDDAARVFGFSCTGGEHRLRNYRSVTTVSELADPAICTVVLESYVVDVPDGNTEDDTRLFADTVIRLNLQKLKSVAEANAAEAAATTNSVLLPRPAE

SEQ ID NO: 320 - protein, 205 aa, Artificial Sequence
  synthetic ZmPYLk homologous to AtPYR1 I110C
MDQQGAGGDVEVPAGLGLTAAEYEQLRPTVDAHHRYAVGEGQCSSLLAQRIHAPPAAVWAIVRRFDCPQVYKHFIRSCAVRPDPDAGDALRPGRLREVCVISGLPASTSTERLDHLDDAARVFGFSCTGGEHRLRNYRSVTTVSELAGPGICTVVLESYAVDVPDGNTEDDTRLFADTVIRLNLQKLKSVAEASTSSSAPPPPSE

SEQ ID NO: 321 - protein, 188 aa, Artificial Sequence
  synthetic ZmPYLj homologous to AtPYR1 I110C
MEPHMESALRQGLSEAEQRELEGVVRAHHTFPGRAPGTCTSLVTQRVDAPLAAVWPIVRGFGSPQRYKHFIKSCDLKAGDGATVGSVREVTVVSGLPASTSTERLEILDDHRHILSFRCVGGDHRLRNYRSVTSVTEFQPGPYCVVLESYVVDVPDGNTEEDTRMFTDTVVKLNLQKLAAIATSSSAN

SEQ ID NO: 322 - protein, 214 aa, Artificial Sequence
  synthetic ZmPYLd homologous to AtPYR1 I110C
MVVEMDGGVGVAAAGGGGAQTPAPPPPRRWRLADERCDLRAMETDYVRRFHRHEPRDHQCSSAVAKHIKAPVHLVWSLVRRFDQPQLFKPFVSRCEMKGNIEIGSVREVNVKSGLPATRSTERLELLDDDERILSVRCVGGDHRLQNYSSILSVTEFQPGPYCVVLESYVVDVPDGNTEEDTRMFTDTVVKLNLQKLAAIATSSSANQTEPLDR

SEQ ID NO: 323 - protein, 209 aa, Artificial Sequence
  synthetic ZmPYLf homologous to AtPYR1 I110C
MVMVEMDGGVGGGGGGGQTPAPRRWRLADERCDLRAMETDYVRRFHRHEPREHQCSSAVAKHIKAPVHLVWSLVRRFDQPQLFKPFVSRCEMKGNIEIGSVREVNVKSGLPATRSTERLELLDDNEHILSVRCVGGDHRLQNYSSILSVTEFQPGPYCVVLESYVVDVPDGNTEEDTRMFTDTVVKLNLQKLAAIATSSSANQTEPLDR

SEQ ID NO: 324 - protein, 197 aa, Artificial Sequence
  synthetic ZmPYLe homologous to AtPYR1 I110C
MVGLVGGSTARAEHVVANAGGEAEYVRRMHRHAPTEHQCTSTLVKHIKAPVHLVWELVRRFDQPQRYKPFVRNCVVRGDQLEVGSLRDVNVKTGLPATTSTERLEQLDDDLHILGVKCVGGDHRLQNYSSIITVHPESIDGRPGTLVIESFVVDVPDGNTKDETCYFVEAVIKCNLNSLAEVSEQLAVESPTSLIDQ

SEQ ID NO: 325 - protein, 197 aa, Artificial Sequence
  synthetic ZmPYLg homologous to AtPYR1 I110C
MVGLVGGSTARAEHVVANAGGETEYVRRLHRHAPAEHQCTSTLVKHIKAPVHLVWELVRSFDQPQRYKPFVRNCVVRGDQLEVGSLRDVNVKTGLPATTSTERLEQLDDDLHILGVKCVGGDHRLQNYSSIITVHPESIDGRPGTLVIESFVVDVPDGNTKDETCYFVEAVIKCNLKSLAEVSEQLAVESPTSPIDQ

SEQ ID NO: 326 - protein, 233 aa, Artificial Sequence
  synthetic ZmPYLc homologous to AtPYR1 I110S
MRERNSSIDQEHQRGSSSRSTMPFAASRTSQQQHSRVATNGRAVAVCAGHAGVPDEVARHHEHAVAAGQCCAAMVQSIAAPVDAVWSLVRRFDQPQRYKRFIRSCHLVDGDGAEVGSVRELLLVSGLPAESSRERLEIRDDERRVISFRSLGGDHRLANYRSVTTVHEAAPSQDGRPLTMVVESYVVDVPPGNTVEETRIFVDTIVRCNLQSLEGTVIRQLEIAAMPHDDNQN

SEQ ID NO: 327 - protein, 213 aa, Artificial Sequence
  synthetic ZmPYLl homologous to AtPYR1 I110S
MPYAATRTSPQQHSRVASNGRAVAACAGHAGVPDEVARHHEHAVAAGQCCSVMVQSIAAPADAVWSLVRRFDQPQGYKRFIRSCHLVDGDGVEVGSVRELLVVSGLPAENSRERLEIRDDERRVISFRSLGGDHRLANYRSVTTVHEAASEGGPLTMVVESYVVDVPPGNTVEETRIFVDTIVRCNLQSLEDTVIRQQAMAAPAAPHNDHNHS

SEQ ID NO: 328 - protein, 200 aa, Artificial Sequence
  synthetic ZmPYLa homologous to AtPYR1 I110S
MPYTAPRPSPQQHSRVLSGGGAKAASHGASCAAVPAEVARHHEHAARAGQCCSAVVQAIAAPVGAVWSVVRRFDRPQAYKHFIRSCRLVGGGDVAVGSVREVRVVSGLPATSSRERLEILDDERRVLSFRSVGGEHRLANYRSVTTVHEAGAGAGTGTVVVESYVVDVPHGNTADETRVFVDTIVRCNLQSLARTAERLA

SEQ ID NO: 329 - protein, 220 aa, Artificial Sequence
  synthetic ZmPYLb homologous to AtPYR1 I110S
MPCIQASSPGGMPHQHGRGRVLGGGVGCAAEVAAAVAASAGGMRCGAHDGEVPAEAARHHEHAAAGPGRCCSAVVQHVAAPAAAVWSVVRRFDQPQVYKRFVRSCALLAGDGGVGTLREVRVVSGLPAASSRERLEVLDDESHVLSFRSVGGEHRLRNYLSVTTVHPSPAAPDAATVVVESYVVDVPPGNTPEDTRVFVDTIVKCNLQSLATTAEKLAAV

SEQ ID NO: 330 - protein, 218 aa, Artificial Sequence
  synthetic ZmPYLo homologous to AtPYR1 I110S
MPCLQASSPGSMPYQHHGRGVGCAAEAGAAVGASAGTGTRCGAHDGEVPAEAARHHEHAAPGPGRCCSAVVQRVAAPAEAVWSVVRRFDQPQAYKRFVRSCALLAGDGGVGTLREVRVVSGLPAASSRERLEVLDDESHVLSFRSVGGEHRLQNYLSVTTVHPSPAAPDAATVVVESYVVDVPPGNTPEDTRVFVDTIVKCNLQSLATTAEKLALAAV

SEQ ID NO: 331 - protein, 212 aa, Artificial Sequence
  synthetic ZmPYLi homologous to AtPYR1 I110S
MDQQGAGGDAEVPAGLGLTAAEYEQLRSTVDAHHRYAVGEGQCSSLLAQRIHAPPEAVWAVVRRFDCPQVYKHFIRSCALRPDPEAGDALCPGRLREVSVISGLPASTSTERLDLLDDAARVFGFSSTGGEHRLRNYRSVTTVSELADPAICTVVLESYVVDVPDGNTEDDTRLFADTVIRLNLQKLKSVAEANAAEAAATTNSVLLPRPAE

SEQ ID NO: 332 - protein, 205 aa, Artificial Sequence
  synthetic ZmPYLk homologous to AtPYR1 I110S
MDQQGAGGDVEVPAGLGLTAAEYEQLRPTVDAHHRYAVGEGQCSSLLAQRIHAPPAAVWAIVRRFDCPQVYKHFIRSCAVRPDPDAGDALRPGRLREVCVISGLPASTSTERLDHLDDAARVFGFSSTGGEHRLRNYRSVTTVSELAGPGICTVVLESYAVDVPDGNTEDDTRLFADTVIRLNLQKLKSVAEASTSSSAPPPPSE

SEQ ID NO: 333 - protein, 188 aa, Artificial Sequence
  synthetic ZmPYLj homologous to AtPYR1 I110S
MEPHMESALRQGLSEAEQRELEGVVRAHHTFPGRAPGTCTSLVTQRVDAPLAAVWPIVRGFGSPQRYKHFIKSCDLKAGDGATVGSVREVTVVSGLPASTSTERLEILDDHRHILSFRSVGGDHRLRNYRSVTSVTEFQPGPYCVVLESYVVDVPDGNTEEDTRMFTDTVVKLNLQKLAAIATSSSAN

SEQ ID NO: 334 - protein, 214 aa, Artificial Sequence
  synthetic ZmPYLd homologous to AtPYR1 I110S
MVVEMDGGVGVAAAGGGGAQTPAPPPPRRWRLADERCDLRAMETDYVRRFHRHEPRDHQCSSAVAKHIKAPVHLVWSLVRRFDQPQLFKPFVSRCEMKGNIEIGSVREVNVKSGLPATRSTERLELLDDDERILSVRSVGGDHRLQNYSSILSVTEFQPGPYCVVLESYVVDVPDGNTEEDTRMFTDTVVKLNLQKLAAIATSSSANQTEPLDR

SEQ ID NO: 335 - protein, 209 aa, Artificial Sequence
  synthetic ZmPYLf homologous to AtPYR1 I110S
MVMVEMDGGVGGGGGGGQTPAPRRWRLADERCDLRAMETDYVRRFHRHEPREHQCSSAVAKHIKAPVHLVWSLVRRFDQPQLFKPFVSRCEMKGNIEIGSVREVNVKSGLPATRSTERLELLDDNEHILSVRSVGGDHRLQNYSSILSVTEFQPGPYCVVLESYVVDVPDGNTEEDTRMFTDTVVKLNLQKLAAIATSSSANQTEPLDR

SEQ ID NO: 336 - protein, 197 aa, Artificial Sequence
  synthetic ZmPYLe homologous to AtPYR1 I110S
MVGLVGGSTARAEHVVANAGGEAEYVRRMHRHAPTEHQCTSTLVKHIKAPVHLVWELVRRFDQPQRYKPFVRNCVVRGDQLEVGSLRDVNVKTGLPATTSTERLEQLDDDLHILGVKSVGGDHRLQNYSSIITVHPESIDGRPGTLVIESFVVDVPDGNTKDETCYFVEAVIKCNLNSLAEVSEQLAVESPTSLIDQ

SEQ ID NO: 337 - protein, 197 aa, Artificial Sequence
  synthetic ZmPYLg homologous to AtPYR1 I110S
MVGLVGGSTARAEHVVANAGGETEYVRRLHRHAPAEHQCTSTLVKHIKAPVHLVWELVRSFDQPQRYKPFVRNCVVRGDQLEVGSLRDVNVKTGLPATTSTERLEQLDDDLHILGVKSVGGDHRLQNYSSIITVHPESIDGRPGTLVIESFVVDVPDGNTKDETCYFVEAVIKCNLKSLAEVSEQLAVESPTSPIDQ

SEQ ID NO: 338 - protein, 233 aa, Artificial Sequence
  synthetic ZmPYLc homologous to AtPYR1 V81I
MRERNSSIDQEHQRGSSSRSTMPFAASRTSQQQHSRVATNGRAVAVCAGHAGVPDEVARHHEHAVAAGQCCAAMVQSIAAPVDAVWSLVRRFDQPQRYKRFIRSCHLVDGDGAEVGSVREILLVSGLPAESSRERLEIRDDERRVISFRVLGGDHRLANYRSVTTVHEAAPSQDGRPLTMVVESYVVDVPPGNTVEETRIFVDTIVRCNLQSLEGTVIRQLEIAAMPHDDNQN

SEQ ID NO: 339 - protein, 213 aa, Artificial Sequence
  synthetic ZmPYLl homologous to AtPYR1 V81I
MPYAATRTSPQQHSRVASNGRAVAACAGHAGVPDEVARHHEHAVAAGQCCSVMVQSIAAPADAVWSLVRRFDQPQGYKRFIRSCHLVDGDGVEVGSVREILVVSGLPAENSRERLEIRDDERRVISFRILGGDHRLANYRSVTTVHEAASEGGPLTMVVESYVVDVPPGNTVEETRIFVDTIVRCNLQSLEDTVIRQQAMAAPAAPHNDHNHS

SEQ ID NO: 340 - protein, 200 aa, Artificial Sequence
  synthetic ZmPYLa homologous to AtPYR1 V81I
MPYTAPRPSPQQHSRVLSGGGAKAASHGASCAAVPAEVARHHEHAARAGQCCSAVVQAIAAPVGAVWSVVRRFDRPQAYKHFIRSCRLVGGGDVAVGSVREIRVVSGLPATSSRERLEILDDERRVLSFRVVGGEHRLANYRSVTTVHEAGAGAGTGTVVVESYVVDVPHGNTADETRVFVDTIVRCNLQSLARTAERLA

SEQ ID NO: 341 - protein, 220 aa, Artificial Sequence
  synthetic ZmPYLb homologous to AtPYR1 V81I
MPCIQASSPGGMPHQHGRGRVLGGGVGCAAEVAAAVAASAGGMRCGAHDGEVPAEAARHHEHAAAGPGRCCSAVVQHVAAPAAAVWSVVRRFDQPQVYKRFVRSCALLAGDGGVGTLREIRVVSGLPAASSRERLEVLDDESHVLSFRVVGGEHRLRNYLSVTTVHPSPAAPDAATVVVESYVVDVPPGNTPEDTRVFVDTIVKCNLQSLATTAEKLAAV

SEQ ID NO: 342 - protein, 218 aa, Artificial Sequence
  synthetic ZmPYLo homologous to AtPYR1 V81I
MPCLQASSPGSMPYQHHGRGVGCAAEAGAAVGASAGTGTRCGAHDGEVPAEAARHHEHAAPGPGRCCSAVVQRVAAPAEAVWSVVRRFDQPQAYKRFVRSCALLAGDGGVGTLREIRVVSGLPAASSRERLEVLDDESHVLSFRVVGGEHRLQNYLSVTTVHPSPAAPDAATVVVESYVVDVPPGNTPEDTRVFVDTIVKCNLQSLATTAEKLALAAV

SEQ ID NO: 343 - protein, 212 aa, Artificial Sequence
  synthetic ZmPYLi homologous to AtPYR1 V81I
MDQQGAGGDAEVPAGLGLTAAEYEQLRSTVDAHHRYAVGEGQCSSLLAQRIHAPPEAVWAVVRRFDCPQVYKHFIRSCALRPDPEAGDALCPGRLREISVISGLPASTSTERLDLLDDAARVFGFSITGGEHRLRNYRSVTTVSELADPAICTVVLESYVVDVPDGNTEDDTRLFADTVIRLNLQKLKSVAEANAAEAAATTNSVLLPRPAE

SEQ ID NO: 344 - protein, 205 aa, Artificial Sequence
  synthetic ZmPYLk homologous to AtPYR1 V81I
MDQQGAGGDVEVPAGLGLTAAEYEQLRPTVDAHHRYAVGEGQCSSLLAQRIHAPPAAVWAIVRRFDCPQVYKHFIRSCAVRPDPDAGDALRPGRLREICVISGLPASTSTERLDHLDDAARVFGFSITGGEHRLRNYRSVTTVSELAGPGICTVVLESYAVDVPDGNTEDDTRLFADTVIRLNLQKLKSVAEASTSSSAPPPPSE

SEQ ID NO: 345 - protein, 188 aa, Artificial Sequence
  synthetic ZmPYLj homologous to AtPYR1 V81I
MEPHMESALRQGLSEAEQRELEGVVRAHHTFPGRAPGTCTSLVTQRVDAPLAAVWPIVRGFGSPQRYKHFIKSCDLKAGDGATVGSVREITVVSGLPASTSTERLEILDDHRHILSFRVVGGDHRLRNYRSVTSVTEFQPGPYCVVLESYVVDVPDGNTEEDTRMFTDTVVKLNLQKLAAIATSSSAN

SEQ ID NO: 346 - protein, 214 aa, Artificial Sequence
  synthetic ZmPYLd homologous to AtPYR1 V81I
MVVEMDGGVGVAAAGGGGAQTPAPPPPRRWRLADERCDLRAMETDYVRRFHRHEPRDHQCSSAVAKHIKAPVHLVWSLVRRFDQPQLFKPFVSRCEMKGNIEIGSVREINVKSGLPATRSTERLELLDDDERILSVRFVGGDHRLQNYSSILSVTEFQPGPYCVVLESYVVDVPDGNTEEDTRMFTDTVVKLNLQKLAAIATSSSANQTEPLDR

SEQ ID NO: 347 - protein, 213 aa, Artificial Sequence
  synthetic ZmPYLf homologous to AtPYR1 V81I
ZMPYMVMVEMDGGVGGGGGGGQTPAPRRWRLADERCDLRAMETDYVRRFHRHEPREHQCSSAVAKHIKAPVHLVWSLVRRFDQPQLFKPFVSRCEMKGNIEIGSVREINVKSGLPATRSTERLELLDDNEHILSVRFVGGDHRLQNYSSILSVTEFQPGPYCVVLESYVVDVPDGNTEEDTRMFTDTVVKLNLQKLAAIATSSSANQTEPLDR

SEQ ID NO: 348 - protein, 197 aa, Artificial Sequence
  synthetic ZmPYLe homologous to AtPYR1 V81I
MVGLVGGSTARAEHVVANAGGEAEYVRRMHRHAPTEHQCTSTLVKHIKAPVHLVWELVRRFDQPQRYKPFVRNCVVRGDQLEVGSLRDINVKTGLPATTSTERLEQLDDDLHILGVKFVGGDHRLQNYSSIITVHPESIDGRPGTLVIESFVVDVPDGNTKDETCYFVEAVIKCNLNSLAEVSEQLAVESPTSLIDQ

SEQ ID NO: 349 - protein, 197 aa, Artificial Sequence
  synthetic ZmPYLg homologous to AtPYR1 V81I
MVGLVGGSTARAEHVVANAGGETEYVRRLHRHAPAEHQCTSTLVKHIKAPVHLVWELVRSFDQPQRYKPFVRNCVVRGDQLEVGSLRDINVKTGLPATTSTERLEQLDDDLHILGVKFVGGDHRLQNYSSIITVHPESIDGRPGTLVIESFVVDVPDGNTKDETCYFVEAVIKCNLKSLAEVSEQLAVESPTSPIDQ

SEQ ID NO: 350 - protein, 233 aa, Artificial Sequence
  synthetic ZmPYLc homologous to AtPYR1 V81Y
MRERNSSIDQEHQRGSSSRSTMPFAASRTSQQQHSRVATNGRAVAVCAGHAGVPDEVARHHEHAVAAGQCCAAMVQSIAAPVDAVWSLVRRFDQPQRYKRFIRSCHLVDGDGAEVGSVREYLLVSGLPAESSRERLEIRDDERRVISFRVLGGDHRLANYRSVTTVHEAAPSQDGRPLTMVVESYVVDVPPGNTVEETRIFVDTIVRCNLQSLEGTVIRQLEIAAMPHDDNQN

SEQ ID NO: 351 - protein, 213 aa, Artificial Sequence
  synthetic ZmPYLl homologous to AtPYR1 V81Y
MPYAATRTSPQQHSRVASNGRAVAACAGHAGVPDEVARHHEHAVAAGQCCSVMVQSIAAPADAVWSLVRRFDQPQGYKRFIRSCHLVDGDGVEVGSVREYLVVSGLPAENSRERLEIRDDERRVISFRILGGDHRLANYRSVTTVHEAASEGGPLTMVVESYVVDVPPGNTVEETRIFVDTIVRCNLQSLEDTVIRQQAMAAPAAPHNDHNHS

SEQ ID NO: 352 - protein, 200 aa, Artificial Sequence
  synthetic ZmPYLa homologous to AtPYR1 V81Y
MPYTAPRPSPQQHSRVLSGGGAKAASHGASCAAVPAEVARHHEHAARAGQCCSAVVQAIAAPVGAVWSVVRRFDRPQAYKHFIRSCRLVGGGDVAVGSVREYRVVSGLPATSSRERLEILDDERRVLSFRVVGGEHRLANYRSVTTVHEAGAGAGTGTVVVESYVVDVPHGNTADETRVFVDTIVRCNLQSLARTAERLA

SEQ ID NO: 353 - protein, 220 aa, Artificial Sequence
  synthetic ZmPYLb homologous to AtPYR1 V81Y
MPCIQASSPGGMPHQHGRGRVLGGGVGCAAEVAAAVAASAGGMRCGAHDGEVPAEAARHHEHAAAGPGRCCSAVVQHVAAPAAAVWSVVRRFDQPQVYKRFVRSCALLAGDGGVGTLREYRVVSGLPAASSRERLEVLDDESHVLSFRVVGGEHRLRNYLSVTTVHPSPAAPDAATVVVESYVVDVPPGNTPEDTRVFVDTIVKCNLQSLATTAEKLAAV

SEQ ID NO: 354 - protein, 218 aa, Artificial Sequence
  synthetic ZmPYLo homologous to AtPYR1 V81Y
MPCLQASSPGSMPYQHHGRGVGCAAEAGAAVGASAGTGTRCGAHDGEVPAEAARHHEHAAPGPGRCCSAVVQRVAAPAEAVWSVVRRFDQPQAYKRFVRSCALLAGDGGVGTLREYRVVSGLPAASSRERLEVLDDESHVLSFRVVGGEHRLQNYLSVTTVHPSPAAPDAATVVVESYVVDVPPGNTPEDTRVFVDTIVKCNLQSLATTAEKLALAAV

SEQ ID NO: 355 - protein, 212 aa, Artificial Sequence
  synthetic ZmPYLi homologous to AtPYR1 V81Y
MDQQGAGGDAEVPAGLGLTAAEYEQLRSTVDAHHRYAVGEGQCSSLLAQRIHAPPEAVWAVVRRFDCPQVYKHFIRSCALRPDPEAGDALCPGRLREYSVISGLPASTSTERLDLLDDAARVFGFSITGGEHRLRNYRSVTTVSELADPAICTVVLESYVVDVPDGNTEDDTRLFADTVIRLNLQKLKSVAEANAAEAAATTNSVLLPRPAE

SEQ ID NO: 356 - protein, 205 aa, Artificial Sequence
  synthetic ZmPYLk homologous to AtPYR1 V81Y
MDQQGAGGDVEVPAGLGLTAAEYEQLRPTVDAHHRYAVGEGQCSSLLAQRIHAPPAAVWAIVRRFDCPQVYKHFIRSCAVRPDPDAGDALRPGRLREYCVISGLPASTSTERLDHLDDAARVFGFSITGGEHRLRNYRSVTTVSELAGPGICTVVLESYAVDVPDGNTEDDTRLFADTVIRLNLQKLKSVAEASTSSSAPPPPSE

SEQ ID NO: 357 - protein, 188 aa, Artificial Sequence
  synthetic ZmPYLj homologous to AtPYR1 V81Y
MEPHMESALRQGLSEAEQRELEGVVRAHHTFPGRAPGTCTSLVTQRVDAPLAAVWPIVRGFGSPQRYKHFIKSCDLKAGDGATVGSVREYTVVSGLPASTSTERLEILDDHRHILSFRVVGGDHRLRNYRSVTSVTEFQPGPYCVVLESYVVDVPDGNTEEDTRMFTDTVVKLNLQKLAAIATSSSAN

SEQ ID NO: 358 - protein, 214 aa, Artificial Sequence
  synthetic ZmPYLd homologous to AtPYR1 V81Y
MVVEMDGGVGVAAAGGGGAQTPAPPPPRRWRLADERCDLRAMETDYVRRFHRHEPRDHQCSSAVAKHIKAPVHLVWSLVRRFDQPQLFKPFVSRCEMKGNIEIGSVREYNVKSGLPATRSTERLELLDDDERILSVRFVGGDHRLQNYSSILSVTEFQPGPYCVVLESYVVDVPDGNTEEDTRMFTDTVVKLNLQKLAAIATSSSANQTEPLDR

SEQ ID NO: 359 - protein, 209 aa, Artificial Sequence
  synthetic ZmPYLf homologous to AtPYR1 V81Y
MVMVEMDGGVGGGGGGGQTPAPRRWRLADERCDLRAMETDYVRRFHRHEPREHQCSSAVAKHIKAPVHLVWSLVRRFDQPQLFKPFVSRCEMKGNIEIGSVREYNVKSGLPATRSTERLELLDDNEHILSVRFVGGDHRLQNYSSILSVTEFQPGPYCVVLESYVVDVPDGNTEEDTRMFTDTVVKLNLQKLAAIATSSSANQTEPLDR

SEQ ID NO: 360 - protein, 197 aa, Artificial Sequence
  synthetic ZmPYLe homologous to AtPYR1 V81Y
MVGLVGGSTARAEHVVANAGGEAEYVRRMHRHAPTEHQCTSTLVKHIKAPVHLVWELVRRFDQPQRYKPFVRNCVVRGDQLEVGSLRDYNVKTGLPATTSTERLEQLDDDLHILGVKFVGGDHRLQNYSSIITVHPESIDGRPGTLVIESFVVDVPDGNTKDETCYFVEAVIKCNLNSLAEVSEQLAVESPTSLIDQ

SEQ ID NO: 361 - protein, 197 aa, Artificial Sequence
  synthetic ZmPYLg homologous to AtPYR1 V81Y
MVGLVGGSTARAEHVVANAGGETEYVRRLHRHAPAEHQCTSTLVKHIKAPVHLVWELVRSFDQPQRYKPFVRNCVVRGDQLEVGSLRDYNVKTGLPATTSTERLEQLDDDLHILGVKFVGGDHRLQNYSSIITVHPESIDGRPGTLVIESFVVDVPDGNTKDETCYFVEAVIKCNLKSLAEVSEQLAVESPTSPIDQ

SEQ ID NO: 362 - DNA, 20 bp, Artificial Sequence
  synthetic ZmPYL-E genomic target sequence
cgcgacgtcaacgtcaagac

SEQ ID NO: 363 - RNA, 17 nt, Artificial Sequence
  synthetic gRNA nucleotide sequence
gacgucaacgucaagac

SEQ ID NO: 364 - RNA, 18 nt, Artificial Sequence
  synthetic gRNA nucleotide sequence
cgacgucaacgucaagac

SEQ ID NO: 365 - RNA, 19 nt, Artificial Sequence
  synthetic gRNA nucleotide sequence
gcgacgucaacgucaagac

SEQ ID NO: 366 - RNA, 20 nt, Artificial Sequence
  synthetic gRNA nucleotide sequence
cgcgacgucaacgucaagac

SEQ ID NO: 367 - RNA, 21 nt, Artificial Sequence
  synthethic gRNA nucleotide sequence
gcgcgacgucaacgucaagac

SEQ ID NO: 368 - DNA, 30 bp, Artificial Sequence
  synthetic maize ZmPYL-E genomic nucleotide sequence
gcaccctggtgatcgagtcgttcgtggtcg

SEQ ID NO: 369 - DNA, 20 bp, Artificial Sequence
  synthetic xZmPYLE-E149L sequence
cctggtgatcctgtcgttcg

SEQ ID NO: 370 - DNA, 76 bp, Artificial Sequence
  synthetic tracRNA scaffold sequence
gttttagagctagaaatagcaagttaaaataaggctagtccgttatcaacttgaaaaagtggcaccgagtcggtgc

SEQ ID NO: 371 - DNA, 480 bp, Artificial Sequence
  synthetic expression cassette sequence
gggatctttaaacatacgaacagatcacttaaagttcttctgaagcaacttaaagttatcaggcatgcatggatcttggaggaatcagatgtgcagtcagggaccatagcacaggacaggcgtcttctactggtgctaccagcaaatgctggaagccgggaacactgggtacgttggaaaccacgtgatgtggagtaagataaactgtaggagaaaagcatttcgtagtgggccatgaagcctttcaggacatgtattgcagtatgggccggcccattacgcaattggacgacaacaaagactagtattagtaccacctcggctatccacatagatcaaagctggtttaaaagagttgtgcagatgatccgtggcagcgacgtcaacgtcaagacgttttagagctagaaatagcaagttaaaataaggctagtccgttatcaacttgaaaaagtggcaccgagtcggtgcttttttttt

SEQ ID NO: 372 - DNA, 622 bp, Artificial Sequence
  synthetic expression cassette sequence
tttgtgaaagttgaattacggcatagccgaaggaataacagaatcgtttcacactttcgtaacaaaggtcttcttatcatgtttcagacgatggaggcaaggctgatcaaagtgatcaagcacataaacgcatttttttaccatgtttcactccataagcgtctgagattatcacaagtcacgtctagtagtttgatggtacactagtgacaatcagttcgtgcagacagagctcatacttgactacttgagcgattacaggcgaaagtgtgaaacgcatgtgatgtgggctgggaggaggagaatatatactaatgggccgtatcctgatttgggctgcgtcggaaggtgcagcccacgcgcgccgtaccgcgcgggtggcgctgctacccactttagtccgttggatggggatccgatggtttgcgcggtggcgttgcgggggatgtttagtaccacatcggaaaccgaaagacgatggaaccagcttataaacccgcgcgctgtagtcagcttgcgcgacgtcaacgtcaagacgttttagagctagaaatagcaagttaaaataaggctagtccgttatcaacttgaaaaagtggcaccgagtcggtgcttttttttt

SEQ ID NO: 373 - DNA, 622 bp, Artificial Sequence
  synthetic expression cassette sequence with SEQ ID NO:369 target sequence
tttgtgaaagttgaattacggcatagccgaaggaataacagaatcgtttcacactttcgtaacaaaggtcttcttatcatgtttcagacgatggaggcaaggctgatcaaagtgatcaagcacataaacgcatttttttaccatgtttcactccataagcgtctgagattatcacaagtcacgtctagtagtttgatggtacactagtgacaatcagttcgtgcagacagagctcatacttgactacttgagcgattacaggcgaaagtgtgaaacgcatgtgatgtgggctgggaggaggagaatatatactaatgggccgtatcctgatttgggctgcgtcggaaggtgcagcccacgcgcgccgtaccgcgcgggtggcgctgctacccactttagtccgttggatggggatccgatggtttgcgcggtggcgttgcgggggatgtttagtaccacatcggaaaccgaaagacgatggaaccagcttataaacccgcgcgctgtagtcagcttgcctggtgatcgagtcgttcggttttagagctagaaatagcaagttaaaataaggctagtccgttatcaacttgaaaaagtggcaccgagtcggtgcttttttttt

SEQ ID NO: 374 - DNA, 481 bp, Artificial Sequence
  synthetic expression cassette sequence with SEQ ID NO:369 target sequence
gggatctttaaacatacgaacagatcacttaaagttcttctgaagcaacttaaagttatcaggcatgcatggatcttggaggaatcagatgtgcagtcagggaccatagcacaggacaggcgtcttctactggtgctaccagcaaatgctggaagccgggaacactgggtacgttggaaaccacgtgatgtggagtaagataaactgtaggagaaaagcatttcgtagtgggccatgaagcctttcaggacatgtattgcagtatgggccggcccattacgcaattggacgacaacaaagactagtattagtaccacctcggctatccacatagatcaaagctggtttaaaagagttgtgcagatgatccgtggcacctggtgatcgagtcgttcggttttagagctagaaatagcaagttaaaataaggctagtccgttatcaacttgaaaaagtggcaccgagtcggtgcttttttttt

SEQ ID NO: 375 - DNA, 40 bp, Artificial Sequence
  synthetic repair DNA sequence
gcagcctgcgcgacgccaacgtcaagaccggcctgccggc

SEQ ID NO: 376 - DNA, 50 bp, Artificial Sequence
  synthetic repair DNA sequence
ggtcggcagcctgcgcgacgccaacgtcaagaccggcctgccggcgacga

SEQ ID NO: 377 - DNA, 70 bp, Artificial Sequence
  synthetic repair DNA sequence
accagctcgaggtcggcagcctgcgcgacgccaacgtcaagaccggcctgccggcgacgaccagaaccga

SEQ ID NO: 378 - DNA, 111 bp, Artificial Sequence
  synthetic repair DNA sequence
gaactgcgtcgtgcgcggggaccagctcgaggtcggcagcctgcgcgacgccaacgtcaagaccggcctgccggcgacgaccagaaccgagcgcctcgagcagctcgacga

SEQ ID NO: 379 - DNA, 60 bp, Artificial Sequence
  synthetic repair donor oligonucleotide sequence
tgacgggaggccgggcaccctggtgatcctgtcgttcgtagtcgatgtgcctgatggcaa

SEQ ID NO: 380 - DNA, 72 bp, Artificial Sequence
  synthetic repair donor oligonucleotide sequence
  misc_feature (1)..(4): phosphorothioate linkage between nucleotides
  misc_feature (69)..(72): phosphorothioate linkage between nucleotides
ttcgtgttgccatcaggcacatcgactacgaacgacaggatcaccagggtgcccggcctcccgtcaatgctc

SEQ ID NO: 381 - DNA, 41 bp, Artificial Sequence
  synthetic repair DNA sequence
ggcagcctgcgcgacatcaacgtcaagaccggcctgccggc

SEQ ID NO: 382 - DNA, 51 bp, Artificial Sequence
  synthetic repair DNA sequence
aggtcggcagcctgcgcgacatcaacgtcaagaccggcctgccggcgacga

SEQ ID NO: 383 - DNA, 71 bp, Artificial Sequence
  synthetic repair DNA sequence
gaccagctcgaggtcggcagcctgcgcgacatcaacgtcaagaccggcctgccggcgacgaccagaaccga

SEQ ID NO: 384 - DNA, 112 bp, Artificial Sequence
  synthetic repair DNA sequence
ggaactgcgtcgtgcgcggggaccagctcgaggtcggcagcctgcgcgacatcaacgtcaagaccggcctgccggcgacgaccagaaccgagcgcctcgagcagctcgacga

SEQ ID NO: 385 - DNA, 41 bp, Artificial Sequence
  synthetic repair DNA sequence
ggcagcctgcgcgactacaacgtcaagaccggcctgccggc

SEQ ID NO: 386 - DNA, 51 bp, Artificial Sequence
  synthetic repair DNA sequence
aggtcggcagcctgcgcgactacaacgtcaagaccggcctgccggcgacga

SEQ ID NO: 387 - DNA, 71 bp, Artificial Sequence
  synthetic repair DNA sequence
gaccagctcgaggtcggcagcctgcgcgactacaacgtcaagaccggcctgccggcgacgaccagaaccga

SEQ ID NO: 388 - DNA, 112 bp, Artificial Sequence
  synthetic repair DNA sequence
ggaactgcgtcgtgcgcggggaccagctcgaggtcggcagcctgcgcgactacaacgtcaagaccggcctgccggcgacgaccagaaccgagcgcctcgagcagctcgacga

SEQ ID NO: 389 - protein, 197 aa, Artificial Sequence
  synthetic PYR/PYL receptor polypeptide comprising subtitution V89A in PYL-E
MVGLVGGSTARAEHVVANAGGEAEYVRRMHRHAPTEHQCTSTLVKHIKAPVHLVWELVRRFDQPQRYKPFVRNCVVRGDQLEVGSLRDANVKTGLPATTSTERLEQLDDDLHILGVKFVGGDHRLQNYSSIITVHPESIDGRPGTLVIESFVVDVPDGNTKDETCYFVEAVIKCNLNSLAEVSEQLAVESPTSLIDQ

SEQ ID NO: 390 - protein, 197 aa, Artificial Sequence
  synthetic PYR/PYL receptor polypeptide comprising substitutions V89A and E149L in PYL-E
MVGLVGGSTARAEHVVANAGGEAEYVRRMHRHAPTEHQCTSTLVKHIKAPVHLVWELVRRFDQPQRYKPFVRNCVVRGDQLEVGSLRDANVKTGLPATTSTERLEQLDDDLHILGVKFVGGDHRLQNYSSIITVHPESIDGRPGTLVILSFVVDVPDGNTKDETCYFVEAVIKCNLNSLAEVSEQLAVESPTSLIDQ

SEQ ID NO: 391 - protein, 197 aa, Artificial Sequence
  synthetic PYR/PYL receptor polypeptide comprising substitutions V89I and E149L in PYL-E
MVGLVGGSTARAEHVVANAGGEAEYVRRMHRHAPTEHQCTSTLVKHIKAPVHLVWELVRRFDQPQRYKPFVRNCVVRGDQLEVGSLRDINVKTGLPATTSTERLEQLDDDLHILGVKFVGGDHRLQNYSSIITVHPESIDGRPGTLVILSFVVDVPDGNTKDETCYFVEAVIKCNLNSLAEVSEQLAVESPTSLIDQ

SEQ ID NO: 392 - protein, 197 aa, Artificial Sequence
  synthetic PYR/PYL receptor polypeptide comprising substitutions V89Y and E149L in PYL-E
MVGLVGGSTARAEHVVANAGGEAEYVRRMHRHAPTEHQCTSTLVKHIKAPVHLVWELVRRFDQPQRYKPFVRNCVVRGDQLEVGSLRDYNVKTGLPATTSTERLEQLDDDLHILGVKFVGGDHRLQNYSSIITVHPESIDGRPGTLVILSFVVDVPDGNTKDETCYFVEAVIKCNLNSLAEVSEQLAVESPTSLIDQ

SEQ ID NO: 393 - DNA, 20 bp, Artificial Sequence
  synthetic gRNA target sequence
gtcggggacgtcgacgacga

SEQ ID NO: 394 - DNA, 20 bp, Artificial Sequence
  synthetic gRNA target sequence
gaggtcatcgacggccggcc

SEQ ID NO: 395 - DNA, 23 bp, Artificial Sequence
  synthetic gRNA target sequence
gctcgtgatcgagtccttcgtgg

SEQ ID NO: 396 - DNA, 20 bp, Artificial Sequence
  synthetic gRNA target sequence
gctcgtgatcgagtccttcg

SEQ ID NO: 397 - DNA, 20 bp, Artificial Sequence
  synthetic gRNA target sequence
cgtcgacgacgtaggactcg

SEQ ID NO: 398 - skipped

SEQ ID NO: 399 - DNA, 75 bp, Artificial Sequence
  synthetic repair donor DNA oligonucleotide
ccttggtgttgccgtcggggacgtcgacgacgaatgacaggatgacgagcgtccctggccggccgtcgatgacct

SEQ ID NO: 400 - DNA, 75 bp, Artificial Sequence; identical to SEQ ID NO: 399
  synthetic repair donor DNA oligonucleotide
  misc_feature (1)..(4): phosphorothioate linkage between nucleotides
  misc_feature (72)..(75): phosphorothioate linkage between nucleotides

SEQ ID NO: 401 - DNA, 88 bp, Artificial Sequence
  synthetic repair donor DNA oligonucleotide
ccatcctcaccgtccacccggaggtcatcgacggccgaccagggacgctcgtcatcctgtccttcgtcgtcgacgtccccgacggcaa

SEQ ID NO: 402 - DNA, 60 bp, Artificial Sequence
  synthetic repair donor DNA oligonucleotide
cgacggccgaccggggacgctcgtgatcctgtccttcgtggtggacgtccccgacggcaa

SEQ ID NO: 403 - DNA, 60 bp, Artificial Sequence
  synthetic repair donor DNA oligonucleotide
cgacggccgaccggggacgctcgtgatcctgtccttcgtagtggacgtccccgacggcaa

SEQ ID NO: 404 - DNA, 77 bp, Artificial Sequence
  synthetic repair donor DNA oligonucleotide
aggtcatcgacggccgaccggggacgctcgtgatcctgtccttcgtagtggacgtccccgacggcaacaccaaggac

SEQ ID NO: 405 - DNA, 77 bp, Artificial Sequence
  synthetic repair donor DNA oligonucleotide
gtccttggtgttgccgtcggggacgtccactacgaaggacaggatcacgagcgtccccggtcggccgtcgatgacct

SEQ ID NO: 406 - DNA, 77 bp, Artificial Sequence; identical to SEQ ID NO: 405
  synthetic repair donor DNA oligonucleotide
  misc_feature (1)..(4): phosphorothioate linkage between nucleotides
  misc_feature (74)..(77): phosphorothioate linkage between nucleotides

SEQ ID NO: 407 - DNA, 68 bp, Artificial Sequence
  synthetic repair donor DNA oligonucleotide
caccgagttccagccgggcccctactgcgtcgtgctcctgtcctacgtcgtcgacgtccccgacggca

SEQ ID NO: 408 - DNA, 68 bp, Artificial Sequence
  synthetic repair donor DNA oligonucleotide
tgccgtcggggacgtcgacgacgtaggacaggagcacgacgcagtaggggcccggctggaactcggtg

SEQ ID NO: 409 - DNA, 68 bp, Artificial Sequence; identical to SEQ ID NO: 408
  synthetic repair donor DNA oligonucleotide
  misc_feature (1)..(4): phosphorothioate linkage between nucleotides
  misc_feature (65)..(68): phosphorothioate linkage between nucleotides

SEQ ID NO: 410 - DNA, 88 bp, Artificial Sequence
  synthetic repair donor DNA oligonucleotide
tcacctccgtcaccgagttccagccgggcccctactgcgtcgtgctcctgtcctacgtcgtcgacgtccccgacggcaacaccgagga

SEQ ID NO: 411 - protein, 23 aa, Artificial Sequence
  synthetic peptide comprising linker and tobacco etch virus (TEV) protease cleavage site
GGGSQFGSGGGGGSGSENLYFQS

SEQ ID NO: 412 - DNA, 30 bp, Artificial Sequence
  synthetic maize ZmPYL-E mutant sequence
gcaccctggtgatcctgtcgttcgtggtcg

SEQ ID NO: 413 - DNA, 85 bp, Artificial Sequence
  synthetic termination sequence
gttttagagctagaaatagcaagttaaaataaggctagtccgttatcaacttgaaaaagtggcaccgagtcggtgcttttttttt

SEQ ID NO: 414 - DNA, 56 bp, Artificial Sequence
  synthetic maize ZmPYL-F wild-type sequence
gacggccgaccggggacgctcgtgatcgagtccttcgtggtggacgtccccgacgg

SEQ ID NO: 415 - DNA, 57 bp, Artificial Sequence
  synthetic maize ZmPYL-F sequence with targeted mutation 1a
gacggccgaccggggacgctcgtgatcgagtccttcgatggtggacgtccccgacgg

SEQ ID NO: 416 - DNA, 9 bp, Artificial Sequence
  synthetic maize ZmPYL-F sequence with targeted mutation 1b
ccccgacgg

SEQ ID NO: 417 - DNA, 53 bp, Artificial Sequence
  synthetic maize ZmPYL-F sequence with targeted mutation 2a
gacggccgaccggggacgctcgtgatcgagtccttggtggacgtccccgacgg

SEQ ID NO: 418 - DNA, 38 bp, Artificial Sequence
  synthetic maize ZmPYL-F sequence with targeted mutation 2b
gacggccgaccggggacgctcgtgatcgagcccgacgg

SEQ ID NO: 419 - DNA, 55 bp, Artificial Sequence
  synthetic maize ZmPYL-F sequence with targeted mutation 3a
gacggccgaccggggacgctcgtgatcgagtccttctggtggacgtccccgacgg

SEQ ID NO: 420 - DNA, 57 bp, Artificial Sequence
  synthetic maize ZmPYL-F sequence with targeted mutation 3b
gacggccgaccggggacgctcgtgatcgagtccttcggtggtggacgtccccgacgg

SEQ ID NO: 421 - DNA, 55 bp, Artificial Sequence
  ynthetic maize ZmPYL-F sequence with targeted mutation 4a
gacggccgaccggggacgctcgtgatcgagtccttcgggtggacgtccccgacgg

SEQ ID NO: 422 - DNA, 57 bp, Artificial Sequence; identical to SEQ ID NO: 420
  synthetic maize ZmPYL-F sequence with targeted mutation 4b

SEQ ID NO: 423 - DNA, 63 bp, Artificial Sequence
  synthetic maize ZmPYL-F sequence with targeted mutation 5
gacggccgaccggggacgctcgtgatcgagtccttctcaagtgcaacctcaagtccccgacgg

SEQ ID NO: 424 - DNA, 41 bp, Artificial Sequence
  synthetic maize ZmPYL-F sequence with targeted mutation 6
gacggccgaccggggacgctcgtgatcgagtcccccgacgg

SEQ ID NO: 425 - DNA, 49 bp, Artificial Sequence
  synthetic maize ZmPYL-F sequence with targeted mutation 7a
gacggccgaccggggacgctcgtgatcgagtggtggacgtccccgacgg

SEQ ID NO: 426 - DNA, 55 bp, Artificial Sequence; identical to SEQ ID NO: 421
  synthetic maize ZmPYL-F sequence with targeted mutation 7b

SEQ ID NO: 427 - DNA, 57 bp, Artificial Sequence
  synthetic maize ZmPYL-F sequence with targeted mutation 8a
gacggccgaccggggacgctcgtgatcgagtccttcgttggtggacgtccccgacgg

SEQ ID NO: 428 - DNA, 46 bp, Artificial Sequence
  synthetic maize ZmPYL-F sequence with targeted mutation 8b
gacggccgaccggggacgctcgtgatcgagtggacgtccccgacgg

SEQ ID NO: 429 - DNA, 51 bp, Artificial Sequence
  synthetic maize ZmPYL-F sequence with targeted mutation 9a
gacggccgaccggggacgctcgtgatcgagtccttcgacgtccccgacggc

SEQ ID NO: 430 - DNA, 29 bp, Artificial Sequence
  synthetic maize ZmPYL-F sequence with targeted mutation 9b
gacggccgaccggggacgtccccgacggc
